(19) United States
(12) Patent Application Publication
(10) Pub. No.: US 2023/0235331 A1
(43) Pub. Date: Jul. 27, 2023

(54) COMPOUNDS AND METHODS FOR REDUCING MSH3 EXPRESSION

(71) Applicant: Ionis Pharmaceuticals, Inc., Carlsbad, CA (US)

(72) Inventors: Kenneth W. Dobie, Solana Beach, CA (US); Huynh-Hoa Bui, San Diego, CA (US); Susan M. Freier, San Diego, CA (US)

(73) Assignee: Ionis Pharmaceuticals, Inc., Carlsbad, CA (US)

(21) Appl. No.: 18/001,241

(22) PCT Filed: Jun. 10, 2021
(86) PCT No.: PCT/US21/36873

§ 371 Date: Dec. 8, 2022

Related U.S. Application Data
(60) Provisional application No. 63/038,024, filed on Jun. 11, 2020.
(60) Provisional application No. 63/045,728, filed on Jun. 29, 2020.
(60) Provisional application No. 63/178,203, filed on Apr. 22, 2021.

(51) Int. Cl. C12N 15/113

(52) U.S. Cl. CPC C12N 15/1135; C12N 2310/3231; C12N 2310/322; C12N 2310/321; C12N 2310/3233; C12N 2310/315; C12N 2310/3341; C12N 2310/351; C12N 2310/11; C12N 2310/346; C12N 2310/341; C12N 2320/30

(57) ABSTRACT

Provided are compounds, methods, and pharmaceutical compositions for reducing the amount or activity of MSH3 RNA in a cell or subject, and in certain instances reducing the amount of MSH3 protein in a cell or subject. These compounds, methods, and pharmaceutical compositions are useful to ameliorate at least one symptom or hallmark of a repeat expansion disease. Such symptoms and hallmarks include brain atrophy, muscle atrophy, nerve degeneration, uncontrolled movement, seizure, tremors, muscle weakness, muscle cramping, difficulty swallowing, difficulty speaking, decreased memory, decreased cognition, anxiety, and depression. Non-limiting examples of repeat expansion diseases that benefit from these compounds, methods, and pharmaceutical compositions are myotonic dystrophy (DM1 and DM2), amyotrophic lateral sclerosis, frontotemporal dementia, Huntington's disease, various polyglutamine disorders, Friedrich's ataxia, Fragile X syndrome, or spinocerebellar ataxia (e.g., SCA1, SCA2, SCA3, SCA6, SCAT, SCA8, SCA10, or SCA17).

### SEQUENCE LISTING

[0001] The present application is being filed along with a Sequence Listing in electronic format. The Sequence Listing is provided as a file entitled BIOL0385WOSEQ_ST25.txt, created on Jun. 8, 2021, which is 1,127 kb in size. The information in the electronic format of the sequence listing is incorporated herein by reference in its entirety.

### FIELD

[0002] Provided are compounds, methods, and pharmaceutical compositions for reducing the amount of MutS Homolog 3 (MSH3) RNA in a cell or a subject, and in certain instances reducing the amount of MSH3 protein in a cell or subject. Such compounds, methods, and pharmaceutical compositions are useful to ameliorate at least one symptom or hallmark of a repeat expansion disease. Non-limiting examples of repeat expansion diseases that may be treated with the compounds, methods, and pharmaceutical compositions disclosed herein include myotonic dystrophy (DM1 and DM2), amyotrophic lateral sclerosis, frontotemporal dementia, Huntington's disease, various polyglutamine disorders, Friedrich's ataxia, Fragile X syndrome, or spinocerebellar ataxia (e.g., SCA1, SCA2, SCA3, SCA6, SCA7, SCA8, SCA10, or SCA17).

### BACKGROUND

[0003] Repeat expansion diseases are a group of diseases characterized by a pathological number of consecutive repeat units in a region of a gene, each repeat unit consisting of several linked nucleosides having the same nucleobase sequence as the other repeat units. In general, repeat expansion diseases are genetically inherited. In some cases, an individual is born with a pathological number of repeat units and is symptomatic from a young age. In other cases, an individual is born with a normal, or near normal, number of repeats. However, due to a genetic mutation and genetic instability, the number of repeats increases with cell division, time, and age. The expanded region of the gene ultimately has pathological effects, most often observed as neurological symptoms. Many repeat expansion diseases are classified as a spinocerebellar ataxia, a neurodegenerative disease, or a neuromuscular disease. Non-limiting examples of repeat expansion diseases are myotonic dystrophy (DM1 and DM2), amyotrophic lateral sclerosis, frontotemporal dementia, Huntington's disease, various polyglutamine disorders, Friedrich's ataxia, Fragile X syndrome, or spinocerebellar ataxia (e.g., SCA1, SCA2, SCA3, SCA6, SCA7, SCA8, SCA10, or SCA17).

[0004] MSH3 is part of the DNA damage response pathway (DDR) and DNA mismatch repair system (MMR). MSH3 interacts with MSH2 to form a heterodimer (MutS beta) that binds to regions of DNA containing one or more nucleobase pair mismatches. MutS beta can also recognize small loops of single stranded DNA that extend from double stranded DNA, also known as insertion/deletion loops (IDL). MutS beta interacts with and sends signals to other MMR components to excise IDL and repair the DNA. In some instances, MMR is involved in repeat expansion because a repeat region can form a hairpin structure with mismatched bases. Unfortunately, in its attempt to repair these repeat regions, MutS beta may contribute to their instability and thus, their expansion.

### SUMMARY OF THE INVENTION

[0005] Provided herein are compounds, methods, and pharmaceutical compositions for reducing the amount or activity of MSH3 RNA, and in certain embodiments reducing the amount or activity of MSH3 protein in a cell or a subject. In certain embodiments, the subject has a repeat expansion disease. In certain embodiments, the repeat expansion disease is myotonic dystrophy (DM1 and DM2), amyotrophic lateral sclerosis, frontotemporal dementia, Huntington's disease, various polyglutamine disorders, Friedrich's ataxia, Fragile X syndrome, or spinocerebellar ataxia (e.g., SCA1, SCA2, SCA3, SCA6, SCA7, SCA8, SCA10, or SCA17). In certain embodiments, compounds useful for reducing the amount or activity of MSH3 RNA are oligomeric compounds. In certain embodiments, compounds useful for reducing expression of MSH3 RNA are modified oligonucleotides.

[0006] Also provided herein are methods useful for ameliorating at least one symptom or hallmark of a repeat expansion disease. In certain embodiments, the repeat expansion disease is myotonic dystrophy (DM1 and DM2), amyotrophic lateral sclerosis, frontotemporal dementia, Huntington's disease, various polyglutamine disorders, Friedrich's ataxia, Fragile X syndrome, or spinocerebellar ataxia (e.g., SCA1, SCA2, SCA3, SCA6, SCA7, SCA8, SCA10, or SCA17). In certain embodiments, the at least one symptom or hallmark is selected from brain atrophy, muscle atrophy, nerve degeneration, uncontrolled movement, seizure, tremors, muscle weakness, muscle cramping, difficulty swallowing, difficulty speaking, decreased memory, decreased cognition, anxiety, and depression, and any combination thereof. In certain embodiments, methods disclosed herein are useful for reducing brain atrophy, muscle atrophy, nerve degeneration, uncontrolled movement, seizure, tremors, muscle weakness, muscle cramping, difficulty swallowing, difficulty speaking, decreased memory, decreased cognition, anxiety, depression, or any combination thereof. In certain embodiments, methods disclosed herein are useful for preventing brain atrophy, muscle atrophy, nerve degeneration, uncontrolled movement, seizure, tremors, muscle weakness, muscle cramping, difficulty swallowing, difficulty speaking, decreased memory, decreased cognition, anxiety, depression, or any combination thereof.

### DETAILED DESCRIPTION OF THE INVENTION

[0007] It is to be understood that both the foregoing general description and the following detailed description are exemplary and explanatory only and are not restrictive. Herein, the use of the singular includes the plural unless specifically stated otherwise. As used herein, the use of “or” means “and/or” unless stated otherwise. Furthermore, the use of the term “including” as well as other forms, such as “includes” and “included”, is not limiting. Also, terms such as “element” or “component” encompass both elements and components comprising one unit and elements and components that comprise more than one subunit, unless specifically stated otherwise.

[0008] The section headings used herein are for organizational purposes only and are not to be construed as limiting the subject matter described. All documents, or portions of documents, cited in this application, including, but not limited to, patents, patent applications, articles, books, and treatises, are hereby expressly incorporated-by-reference for the portions of the document discussed herein, as well as in their entirety.

### Definitions

[0009] Unless specific definitions are provided, the nomenclature used in connection with, and the procedures and techniques of, analytical chemistry, synthetic organic chemistry, and medicinal and pharmaceutical chemistry described herein are those well-known and commonly used in the art. Where permitted, all patents, applications, published applications and other publications and other data referred to throughout in the disclosure are incorporated by reference herein in their entirety.

[0010] Unless otherwise indicated, the following terms have the following meanings:

[0011] As used herein, “2′-deoxynucleoside” means a nucleoside comprising a 2′-H(H) deoxyribosyl sugar moiety. In certain embodiments, a 2′-deoxynucleoside is a 2′-β-D-deoxynucleoside and comprises a 2′-β-D-deoxyribosyl sugar moiety, which has the β-D configuration as found in naturally occurring deoxyribonucleic acids (DNA). In certain embodiments, a 2′-deoxynucleoside or nucleoside comprising an unmodified 2′-deoxyribosyl sugar moiety may comprise a modified nucleobase or may comprise an RNA nucleobase (uracil).

[0012] As used herein, “2′-MOE” or “2′-MOE sugar moiety” means a 2′-OCH₂CH₂OCH₃ group in place of the 2′-OH group of a ribosyl sugar moiety. Unless otherwise indicated, a 2′-MOE sugar moiety is in the β-D configuration. “MOE” means O-methoxyethyl.

[0013] As used herein, “2′-MOE nucleoside” means a nucleoside comprising a 2′-MOE sugar moiety.

[0014] As used herein, “2′-OMe” or “2′-O-methyl sugar moiety” means a 2′-OCH₃ group in place of the 2′-OH group of a ribosyl sugar moiety. Unless otherwise indicated, a 2′-OMe has the β-D stereochemical configuration.

[0015] As used herein, “2′-OMe nucleoside” means a nucleoside comprising a 2′-OMe sugar moiety.

[0016] As used herein, “2′-substituted nucleoside” means a nucleoside comprising a 2′-substituted sugar moiety. As used herein, “2′-substituted” in reference to a sugar moiety means a sugar moiety comprising at least one 2′-substituent group other than H or OH.

[0017] As used herein, “5-methyl cytosine” means a cytosine modified with a methyl group attached to the 5 position. A 5-methyl cytosine is a modified nucleobase.

[0018] As used herein, “administering” means providing a pharmaceutical agent to a subject.

[0019] As used herein, “antisense activity” means any detectable and/or measurable change attributable to the hybridization of an antisense compound to its target nucleic acid. In certain embodiments, antisense activity is a decrease in the amount or expression of a target nucleic acid or protein encoded by such target nucleic acid compared to target nucleic acid levels or target protein levels in the absence of the antisense compound.

[0020] As used herein, “antisense compound” means an oligomeric compound capable of achieving at least one antisense activity.

[0021] As used herein, “ameliorate” in reference to a treatment means improvement in at least one symptom relative to the same symptom in the absence of the treatment. In certain embodiments, amelioration is the reduction in the severity or frequency of a symptom or the delayed onset or slowing of progression in the severity or frequency of a symptom.

[0022] As used herein, “bicyclic nucleoside” or “BNA” means a nucleoside comprising a bicyclic sugar moiety.

[0023] As used herein, “bicyclic sugar” or “bicyclic sugar moiety” means a modified sugar moiety comprising two rings, wherein the second ring is formed via a bridge connecting two of the atoms in the first ring thereby forming a bicyclic structure. In certain embodiments, the first ring of the bicyclic sugar moiety is a furanosyl moiety. In certain embodiments, the bicyclic sugar moiety does not comprise a furanosyl moiety.

[0024] As used herein, “cleavable moiety” means a bond or group of atoms that is cleaved under physiological conditions, for example, inside a cell or a subject.

[0025] As used herein, “complementary” in reference to an oligonucleotide means that at least 70% of the nucleobases of the oligonucleotide or one or more regions thereof and the nucleobases of another nucleic acid or one or more regions thereof are capable of hydrogen bonding with one another when the nucleobase sequence of the oligonucleotide and the other nucleic acid are aligned in opposing directions. As used herein, “complementary nucleobases” means nucleobases that are capable of forming hydrogen bonds with one another. Complementary nucleobase pairs include adenine (A) with thymine (T), adenine (A) with uracil (U), cytosine (C) with guanine (G), and 5-methyl cytosine (mC) with guanine (G). Complementary oligonucleotides and/or nucleic acids need not have nucleobase complementarity at each nucleoside. Rather, some mismatches are tolerated. As used herein, “fully complementary” or “100% complementary” in reference to an oligonucleotide, or portion thereof, means that oligonucleotide, or portion thereof, is complementary to another oligonucleotide or nucleic acid at each nucleobase of the oligonucleotide.

[0026] As used herein, “conjugate group” means a group of atoms that is directly or indirectly attached to an oligonucleotide. Conjugate groups include a conjugate moiety and a conjugate linker that attaches the conjugate moiety to the oligonucleotide.

[0027] As used herein, “conjugate linker” means a single bond or a group of atoms comprising at least one bond that connects a conjugate moiety to an oligonucleotide.

[0028] As used herein, “conjugate moiety” means a group of atoms that is attached to an oligonucleotide via a conjugate linker.

[0029] As used herein, “contiguous” in the context of an oligonucleotide refers to nucleosides, nucleobases, sugar moieties, or internucleoside linkages that are immediately adjacent to each other. For example, “contiguous nucleobases” means nucleobases that are immediately adjacent to each other in a sequence.

[0030] As used herein, “constrained ethyl” or “cEt” or “cEt modified sugar” means a β-D ribosyl bicyclic sugar moiety wherein the second ring of the bicyclic sugar is formed via a bridge connecting the 4′-carbon and the 2′-carbon of the β-D ribosyl sugar moiety, wherein the bridge has the formula 4′-CH(CH₃)—O-2′, and wherein the methyl group of the bridge is in the S configuration.

[0031] As used herein, “cEt nucleoside” means a nucleoside comprising cEt modified sugar moiety.

[0032] As used herein, “chirally enriched population” means a plurality of molecules of identical molecular formula, wherein the number or percentage of molecules within the population that contain a particular stereochemical configuration at a particular chiral center is greater than the number or percentage of molecules expected to contain the same particular stereochemical configuration at the same particular chiral center within the population if the particular chiral center were stereorandom. Chirally enriched populations of molecules having multiple chiral centers within each molecule may contain one or more stereorandom chiral centers. In certain embodiments, the molecules are modified oligonucleotides. In certain embodiments, the molecules are compounds comprising modified oligonucleotides.

[0033] As used herein, “gapmer” means a modified oligonucleotide comprising an internal region having a plurality of nucleosides that support RNase H cleavage positioned between external regions having one or more nucleosides, wherein the nucleosides comprising the internal region are chemically distinct from the nucleoside or nucleosides comprising the external regions. The internal region may be referred to as the “gap” and the external regions may be referred to as the “wings.” Unless otherwise indicated, “gapmer” refers to a sugar motif. Unless otherwise indicated, the sugar moiety of each nucleoside of the gap is a 2′43-D-deoxyribosyl sugar moiety. Thus, the term “MOE gapmer” indicates a gapmer having a gap comprising 2′-β-D-deoxynucleosides and wings comprising 2′-MOE nucleosides. Unless otherwise indicated, a MOE gapmer may comprise one or more modified internucleoside linkages and/or modified nucleobases and such modifications do not necessarily follow the gapmer pattern of the sugar modifications.

[0034] As used herein, “hotspot region” means a range of nucleobases on a target nucleic acid that is amenable to oligomeric compound-mediated reduction of the amount or activity of the target nucleic acid.

[0035] As used herein, “hybridization” means the pairing or annealing of complementary oligonucleotides and/or nucleic acids. While not limited to a particular mechanism, the most common mechanism of hybridization involves hydrogen bonding, which may be Watson-Crick, Hoogsteen or reversed Hoogsteen hydrogen bonding, between complementary nucleobases.

[0036] As used herein, “internucleoside linkage” means the covalent linkage between contiguous nucleosides in an oligonucleotide. As used herein “modified internucleoside linkage” means any internucleoside linkage other than a phosphodiester internucleoside linkage. “Phosphorothioate internucleoside linkage” is a modified internucleoside linkage in which one of the non-bridging oxygen atoms of a phosphodiester internucleoside linkage is replaced with a sulfur atom.

[0037] As used herein, “linker-nucleoside” means a nucleoside that links, either directly or indirectly, an oligonucleotide to a conjugate moiety. Linker-nucleosides are located within the conjugate linker of an oligomeric compound. Linker-nucleosides are not considered part of the oligonucleotide portion of an oligomeric compound even if they are contiguous with the oligonucleotide.

[0038] As used herein, “non-bicyclic modified sugar moiety” means a modified sugar moiety that comprises a modification, such as a substituent, that does not form a bridge between two atoms of the sugar to form a second ring.

[0039] As used herein, “mismatch” or “non-complementary” means a nucleobase of a first oligonucleotide that is not complementary with the corresponding nucleobase of a second oligonucleotide or target nucleic acid when the first and second oligonucleotide are aligned.

[0040] As used herein, “motif” means the pattern of unmodified and/or modified sugar moieties, nucleobases, and/or internucleoside linkages, in an oligonucleotide.

[0041] As used herein, “nucleobase” means an unmodified nucleobase or a modified nucleobase. As used herein an “unmodified nucleobase” is adenine (A), thymine (T), cytosine (C), uracil (U), or guanine (G). As used herein, a “modified nucleobase” is a group of atoms other than unmodified A, T, C, U, or G capable of pairing with at least one unmodified nucleobase. A “5-methyl cytosine” is a modified nucleobase. A universal base is a modified nucleobase that can pair with any one of the five unmodified nucleobases. As used herein, “nucleobase sequence” means the order of contiguous nucleobases in a nucleic acid or oligonucleotide independent of any sugar or internucleoside linkage modification.

[0042] As used herein, “nucleoside” means a compound comprising a nucleobase and a sugar moiety. The nucleobase and sugar moiety are each, independently, unmodified or modified. As used herein, “modified nucleoside” means a nucleoside comprising a modified nucleobase and/or a modified sugar moiety. Modified nucleosides include abasic nucleosides, which lack a nucleobase. “Linked nucleosides” are nucleosides that are connected in a contiguous sequence (i.e., no additional nucleosides are presented between those that are linked).

[0043] As used herein, “oligomeric compound” means an oligonucleotide and optionally one or more additional features, such as a conjugate group or terminal group. An oligomeric compound may be paired with a second oligomeric compound that is complementary to the first oligomeric compound or may be unpaired. A “singled-stranded oligomeric compound” is an unpaired oligomeric compound. The term “oligomeric duplex” means a duplex formed by two oligomeric compounds having complementary nucleobase sequences. Each oligomeric compound of an oligomeric duplex may be referred to as a “duplexed oligomeric compound.”

[0044] As used herein, “oligonucleotide” means a strand of linked nucleosides connected via internucleoside linkages, wherein each nucleoside and internucleoside linkage may be modified or unmodified. Unless otherwise indicated, oligonucleotides consist of 8-50 linked nucleosides. As used herein, “modified oligonucleotide” means an oligonucleotide, wherein at least one nucleoside or internucleoside linkage is modified. As used herein, “unmodified oligonucleotide” means an oligonucleotide that does not comprise any nucleoside modifications or internucleoside modifications.

[0045] As used herein, “pharmaceutically acceptable carrier or diluent” means any substance suitable for use in administering to a subject. Certain such carriers enable pharmaceutical compositions to be formulated as, for example, tablets, pills, dragees, capsules, liquids, gels, syrups, slurries, suspension and lozenges for the oral ingestion by a subject. In certain embodiments, a pharmaceutically acceptable carrier or diluent is sterile water, sterile saline, sterile buffer solution or sterile artificial cerebrospinal fluid.

[0046] As used herein “pharmaceutically acceptable salts” means physiologically and pharmaceutically acceptable salts of compounds. Pharmaceutically acceptable salts retain the desired biological activity of the parent compound and do not impart undesired toxicological effects thereto.

[0047] As used herein “pharmaceutical composition” means a mixture of substances suitable for administering to a subject. For example, a pharmaceutical composition may comprise an oligomeric compound and a sterile aqueous solution. In certain embodiments, a pharmaceutical composition shows activity in a free uptake assay in certain cell lines.

[0048] As used herein “prodrug” means a therapeutic agent in a form outside the body that is converted to a different form within a subject or cells thereof. Typically, conversion of a prodrug within the subject is facilitated by the action of an enzymes (e.g., endogenous or viral enzyme) or chemicals present in cells or tissues and/or by physiologic conditions.

[0049] As used herein, “reducing or inhibiting the amount or activity” refers to a reduction or blockade of the transcriptional expression or activity relative to the transcriptional expression or activity in an untreated or control sample and does not necessarily indicate a total elimination of transcriptional expression or activity.

[0050] As used herein, “repeat expansion disease” means a disease wherein there is an increase in a number of consecutive repeat units in a region of a gene of a subject, each repeat unit consisting of 3-10 linked nucleosides having the same nucleobase sequence as the other repeat units, and wherein the number of repeat units are increased to an extent that the subject experiences a symptom or hallmark of the repeat expansion disease.

[0051] As used herein, “repeat region” means a region of a gene comprising three or more repeat units, each repeat unit consisting of 3-10 linked nucleosides having the same nucleobase sequence as the other repeat units. Repeat regions may comprise CTG, CUG, CAG, CUG, GGGGCC, CAG, GAA, or ATTCT.

[0052] As used herein, “RNA” means an RNA transcript and includes pre-mRNA and mature mRNA unless otherwise specified.

[0053] As used herein, “RNAi compound” means an antisense compound that acts, at least in part, through RISC or Ago2 to modulate a target nucleic acid and/or protein encoded by a target nucleic acid. RNAi compounds include, but are not limited to double-stranded siRNA, single-stranded RNA (ssRNA), and microRNA, including microRNA mimics. In certain embodiments, an RNAi compound modulates the amount, activity, and/or splicing of a target nucleic acid. The term RNAi compound excludes antisense compounds that act through RNase H.

[0054] As used herein, “self-complementary” in reference to an oligonucleotide means an oligonucleotide that at least partially hybridizes to itself.

[0055] As used herein, “standard cell assay” means the assay described in Example 1 and reasonable variations thereof.

[0056] As used herein, “stereorandom” in the context of a population of molecules of identical molecular formula means a chiral center having a random stereochemical configuration. For example, in a population of molecules comprising a stereorandom chiral center, the number of molecules having the (S) configuration of the stereorandom chiral center may be but is not necessarily the same as the number of molecules having the (R) configuration of the stereorandom chiral center. The stereochemical configuration of a chiral center is considered random when it is the result of a synthetic method that is not designed to control the stereochemical configuration. In certain embodiments, a stereorandom chiral center is a stereorandom phosphorothioate internucleoside linkage.

[0057] As used herein, “subject” means a human or non-human animal. In certain embodiments, the subject is a human.

[0058] As used herein, “sugar moiety” means an unmodified sugar moiety or a modified sugar moiety. As used herein, “unmodified sugar moiety” means a 2′-OH(H) ribosyl moiety, as found in RNA (an “unmodified RNA sugar moiety”), or a 2′-H(H) deoxyribosyl moiety, as found in DNA (an “unmodified DNA sugar moiety”). Unmodified sugar moieties have one hydrogen at each of the 1′, 3′, and 4′ positions, an oxygen at the 3′ position, and two hydrogens at the 5′ position. As used herein, “modified sugar moiety” or “modified sugar” means a modified furanosyl sugar moiety or a sugar surrogate.

[0059] As used herein, “sugar surrogate” means a modified sugar moiety having other than a furanosyl moiety that can link a nucleobase to another group, such as an internucleoside linkage, conjugate group, or terminal group in an oligonucleotide. Modified nucleosides comprising sugar surrogates can be incorporated into one or more positions within an oligonucleotide and such oligonucleotides are capable of hybridizing to complementary oligomeric compounds or nucleic acids.

[0060] As used herein, “symptom or hallmark” means any physical feature or test result that indicates the existence or extent of a disease or disorder. In certain embodiments, a symptom is apparent to a subject or to a medical professional examining or testing said subject. In certain embodiments, a hallmark is apparent upon invasive diagnostic testing, including, but not limited to, post-mortem tests.

[0061] As used herein, “target nucleic acid” and “target RNA” mean a nucleic acid that an antisense compound is designed to affect.

[0062] As used herein, “target region” means a portion of a target nucleic acid to which an oligomeric compound is designed to hybridize.

[0063] As used herein, “terminal group” means a chemical group or group of atoms that is covalently linked to a terminus of an oligonucleotide.

[0064] As used herein, “therapeutically effective amount” means an amount of a pharmaceutical agent that provides a therapeutic benefit to a subject. For example, a therapeutically effective amount improves a symptom or hallmark of a disease.

### Certain Embodiments

[0065] The present disclosure provides the following non-limiting numbered embodiments:

Embodiment 1. An oligomeric compound comprising a modified oligonucleotide, wherein the modified oligonucleotide consists of 12 to 50 linked nucleosides and has a nucleobase sequence that is at least 90% complementary to an equal length portion of a MSH3 nucleic acid, and wherein the modified oligonucleotide comprises at least one modification selected from a modified sugar moiety and a modified internucleoside linkage.
Embodiment 2. An oligomeric compound comprising a modified oligonucleotide, wherein the modified oligonucleotide consists of 12 to 50 linked nucleosides and has a nucleobase sequence comprising at least 8, 9, 10, 11, 12, 13, 14, 15, 16, 17, 18, 19, or 20 contiguous nucleobases of any of SEQ ID NOs: 10-4198.
Embodiment 3. An oligomeric compound comprising a modified oligonucleotide, wherein the modified oligonucleotide consists of 12 to 50 linked nucleosides and has a nucleobase sequence comprising at least 8, 9, 10, 11, 12, 13, 14, 15, 16, 17, 18, 19, or 20 contiguous nucleobases of any of SEQ ID NOs: 10-2196.
Embodiment 4. An oligomeric compound comprising a modified oligonucleotide, wherein the modified oligonucleotide consists of 12 to 50 linked nucleosides and has a nucleobase sequence comprising at least 8, 9, 10, 11, 12, 13, 14, 15, 16, 17, 18, 19, or 20 contiguous nucleobases of any of SEQ ID NOs: 19, 28, 38, 42, 46, 48, 49, 50, 51, 53, 54, 55, 56, 59, 63, 65, 66, 67, 69, 70, 75, 76, 80, 81, 84, 86, 88, 91, 92, 97, 98, 100, 101, 103, 105, 107, 109, 111, 114, 116, 119, 120, 121, 124, 127, 128, 129, 130, 131, 132, 133, 134, 140, 141, 142, 143, 147, 156, 157, 162, 168, 169, 170, 172, 179, 180, 184, 188, 191, 195, 196, 197, 201, 203, 205, 206, 208, 209, 210, 211, 212, 215, 217, 218, 220, 226, 227, 233, 234, 235, 238, 239, 240, 241, 242, 245, 246, 249, 250, 252, 253, 254, 255, 257, 261, 262, 268, 269, 270, 272, 273, 274, 279, 280, 283, 284, 285, 286, 287, 288, 289, 292, 293, 294, 295, 296, 297, 299, 303, 304, 306, 310, 312, 315, 317, 319, 321, 322, 324, 325, 326, 327, 328, 329, 333, 334, 336, 338, 345, 349, 350, 354, 360, 361, 362, 365, 369, 372, 376, 377, 381, 384, 387, 392, 394, 399, 405, 406, 408, 412, 421, 422, 425, 426, 428, 429, 432, 433, 434, 435, 436, 441, 444, 449, 450, 451, 452, 460, 461, 462, 463, 465, 468, 469, 472, 473, 475, 478, 481, 482, 484, 487, 488, 493, 494, 498, 499, 500, 503, 506, 507, 508, 511, 514, 515, 517, 518, 526, 527, 531, 533, 534, 542, 543, 553, 556, 557, 558, 559, 560, 562, 563, 569, 572, 577, 578, 587, 596, 600, 604, 605, 607, 609, 611, 612, 614, 615, 616, 619, 624, 627, 628, 631, 633, 634, 636, 638, 639, 642, 645, 648, 650, 651, 652, 658, 659, 667, 670, 671, 673, 675, 678, 679, 680, 683, 686, 688, 689, 690, 694, 697, 699, 700, 701, 706, 707, 708, 712, 715, 717, 723, 724, 728, 730, 731, 735, 738, 739, 740, 744, 746, 748, 749, 750, 753, 755, 758, 760, 761, 763, 764, 766, 769, 770, 771, 772, 773, 774, 776, 777, 779, 781, 782, 787, 789, 791, 792, 794, 795, 798, 801, 805, 808, 809, 810, 813, 815, 816, 817, 818, 819, 820, 825, 833, 835, 836, 837, 842, 844, 845, 846, 848, 849, 850, 852, 853, 859, 861, 862, 863, 865, 877, 887, 895, 896, 897, 900, 901, 906, 909, 912, 914, 918, 919, 920, 923, 927, 928, 930, 931, 936, 940, 943, 946, 952, 959, 961, 962, 963, 969, 971, 972, 976, 977, 980, 981, 994, 1000, 1001, 1004, 1005, 1008, 1013, 1014, 1015, 1017, 1024, 1028, 1031, 1033, 1038, 1044, 1050, 1051, 1056, 1061, 1063, 1066, 1068, 1070, 1072, 1075, 1076, 1080, 1083, 1084, 1085, 1091, 1092, 1094, 1096, 1097, 1104, 1105, 1115, 1119, 1125, 1128, 1130, 1133, 1136, 1140, 1145, 1147, 1149, 1150, 1151, 1153, 1156, 1161, 1169, 1170, 1174, 1176, 1177, 1178, 1179, 1180, 1184, 1186, 1193, 1199, 1201, 1204, 1205, 1206, 1208, 1213, 1214, 1217, 1222, 1226, 1229, 1231, 1233, 1240, 1242, 1244, 1245, 1248, 1250, 1255, 1258, 1260, 1261, 1262, 1264, 1266, 1269, 1271, 1272, 1273, 1280, 1282, 1283, 1284, 1287, 1289, 1290, 1291, 1292, 1294, 1295, 1296, 1299, 1300, 1301, 1309, 1310, 1311, 1313, 1314, 1316, 1322, 1323, 1324, 1325, 1326, 1329, 1331, 1332, 1333, 1335, 1342, 1346, 1348, 1350, 1353, 1354, 1355, 1357, 1359, 1361, 1367, 1374, 1376, 1377, 1378, 1379, 1383, 1385, 1386, 1390, 1393, 1395, 1397, 1399, 1401, 1405, 1409, 1411, 1412, 1413, 1417, 1418, 1420, 1421, 1422, 1426, 1428, 1436, 1437, 1440, 1444, 1448, 1451, 1453, 1457, 1459, 1462, 1468, 1469, 1476, 1479, 1483, 1488, 1489, 1490, 1492, 1494, 1495, 1496, 1500, 1502, 1508, 1512, 1513, 1520, 1521, 1522, 1524, 1529, 1532, 1533, 1535, 1538, 1541, 1545, 1547, 1548, 1549, 1550, 1554, 1557, 1558, 1559, 1567, 1570, 1578, 1585, 1589, 1594, 1595, 1596, 1605, 1606, 1610, 1620, 1621, 1622, 1623, 1626, 1628, 1630, 1631, 1634, 1636, 1637, 1638, 1641, 1644, 1645, 1646, 1648, 1651, 1653, 1656, 1657, 1658, 1664, 1666, 1669, 1671, 1672, 1674, 1675, 1676, 1678, 1679, 1680, 1683, 1687, 1688, 1691, 1692, 1694, 1695, 1696, 1697, 1700, 1702, 1705, 1706, 1708, 1709, 1712, 1715, 1716, 1718, 1719, 1722, 1724, 1729, 1731, 1732, 1734, 1735, 1737, 1740, 1745, 1751, 1753, 1754, 1755, 1757, 1759, 1760, 1765, 1766, 1773, 1774, 1779, 1780, 1786, 1787, 1792, 1796, 1797, 1799, 1800, 1805, 1806, 1807, 1811, 1813, 1814, 1816, 1818, 1819, 1821, 1823, 1824, 1826, 1827, 1828, 1832, 1834, 1835, 1836, 1840, 1841, 1842, 1846, 1849, 1852, 1854, 1857, 1861, 1862, 1863, 1864, 1868, 1874, 1878, 1882, 1886, 1888, 1890, 1892, 1893, 1895, 1898, 1902, 1903, 1906, 1907, 1911, 1915, 1924, 1925, 1926, 1930, 1932, 1933, 1935, 1939, 1941, 1942, 1946, 1947, 1951, 1953, 1955, 1957, 1959, 1960, 1962, 1969, 1973, 1974, 1976, 1977, 1982, 1986, 1987, 1989, 1990, 1994, 1999, 2000, 2001, 2003, 2006, 2007, 2010, 2011, 2013, 2015, 2017, 2018, 2019, 2025, 2029, 2033, 2038, 2039, 2043, 2048, 2053, 2054, 2065, 2067, 2068, 2069, 2070, 2073, 2074, 2085, 2093, 2099, 2100, 2103, 2105, 2112, 2115, 2117, 2123, 2125, 2129, 2130, 2141, 2143, 2146, 2148, 2152, 2153, 2156, 2157, 2159, 2161, 2164, 2167, 2171, 2173, 2175, 2177, 2183, 2185, 2187, 2192, 2195, 2201, 2202, 2204, 2207, 2216, 2220, 2224, 2230, 2231, 2232, 2234, 2240, 2243, 2246, 2256, 2263, 2268, 2273, 2287, 2291, 2297, 2298, 2300, 2301, 2307, 2309, 2312, 2315, 2321, 2324, 2325, 2333, 2337, 2339, 2356, 2357, 2359, 2360, 2369, 2379, 2388, 2392, 2399, 2403, 2406, 2426, 2430, 2431, 2432, 2436, 2442, 2446, 2459, 2461, 2473, 2476, 2478, 2489, 2502, 2503, 2505, 2512, 2513, 2523, 2526, 2534, 2539, 2540, 2541, 2542, 2544, 2555, 2561, 2562, 2569, 2570, 2572, 2573, 2574, 2581, 2586, 2589, 2590, 2591, 2596, 2616, 2627, 2630, 2640, 2645, 2655, 2665, 2666, 2668, 2671, 2675, 2679, 2683, 2687, 2690, 2691, 2693, 2697, 2699, 2703, 2704, 2707, 2710, 2711, 2712, 2714, 2715, 2721, 2724, 2729, 2730, 2732, 2735, 2745, 2746, 2748, 2749, 2752, 2753, 2754, 2757, 2761, 2763, 2767, 2769, 2771, 2773, 2774, 2777, 2778, 2791, 2794, 2795, 2796, 2807, 2808, 2811, 2812, 2813, 2815, 2817, 2818, 2826, 2831, 2832, 2833, 2836, 2837, 2846, 2847, 2848, 2857, 2867, 2868, 2870, 2871, 2876, 2881, 2882, 2885, 2890, 2896, 2899, 2901, 2906, 2913, 2916, 2920, 2925, 2927, 2933, 2939, 2940, 2942, 2948, 2950, 2957, 2968, 2969, 2974, 2978, 2983, 2984, 2985, 2988, 2989, 3001, 3004, 3006, 3007, 3011, 3016, 3018, 3026, 3039, 3040, 3041, 3044, 3045, 3051, 3052, 3053, 3062, 3064, 3065, 3066, 3067, 3069, 3076, 3081, 3084, 3086, 3088, 3091, 3092, 3094, 3100, 3102, 3110, 3114, 3116, 3117, 3118, 3121, 3123, 3124, 3125, 3129, 3131, 3133, 3135, 3141, 3144, 3146, 3147, 3150, 3151, 3154, 3155, 3158, 3159, 3162, 3163, 3169, 3171, 3172, 3176, 3179, 3180, 3182, 3185, 3186, 3187, 3196, 3200, 3201, 3202, 3205, 3207, 3212, 3213, 3217, 3224, 3228, 3230, 3233, 3236, 3238, 3239, 3240, 3242, 3243, 3245, 3249, 3255, 3263, 3271, 3273, 3274, 3277, 3282, 3283, 3286, 3292, 3294, 3295, 3299, 3300, 3301, 3307, 3308, 3318, 3323, 3328, 3332, 3337, 3341, 3342, 3344, 3345, 3346, 3348, 3350, 3351, 3352, 3353, 3355, 3356, 3357, 3360, 3365, 3366, 3371, 3372, 3374, 3375, 3377, 3378, 3380, 3383, 3384, 3386, 3388, 3393, 3398, 3399, 3400, 3403, 3404, 3406, 3408, 3412, 3415, 3418, 3419, 3422, 3424, 3428, 3429, 3430, 3432, 3444, 3448, 3450, 3451, 3454, 3460, 3471, 3474, 3476, 3477, 3478, 3479, 3480, 3481, 3483, 3485, 3488, 3490, 3491, 3492, 3493, 3496, 3510, 3511, 3515, 3516, 3517, 3520, 3521, 3522, 3524, 3526, 3527, 3528, 3529, 3530, 3532, 3533, 3536, 3539, 3542, 3543, 3544, 3547, 3548, 3550, 3555, 3556, 3557, 3558, 3560, 3564, 3568, 3569, 3574, 3576, 3578, 3583, 3587, 3594, 3602, 3605, 3607, 3612, 3614, 3617, 3627, 3629, 3630, 3634, 3637, 3640, 3641, 3646, 3655, 3656, 3662, 3663, 3665, 3666, 3667, 3670, 3671, 3672, 3678, 3680, 3684, 3686, 3687, 3692, 3693, 3695, 3696, 3698, 3701, 3702, 3705, 3706, 3707, 3709, 3712, 3717, 3719, 3726, 3727, 3729, 3734, 3747, 3753, 3755, 3758, 3784, 3791, 3798, 3800, 3807, 3811, 3814, 3815, 3816, 3817, 3821, 3822, 3824, 3829, 3837, 3852, 3855, 3860, 3863, 3872, 3875, 3876, 3881, 3886, 3892, 3899, 3900, 3902, 3903, 3914, 3918, 3923, 3930, 3938, 3940, 3942, 3945, 3950, 3953, 3955, 3958, 3967, 3970, 3971, 3977, 3978, 3979, 3980, 3987, 3992, 3993, 3994, 4003, 4004, 4005, 4006, 4008, 4010, 4011, 4012, 4013, 4015, 4020, 4021, 4023, 4024, 4025, 4029, 4032, 4034, 4036, 4037, 4038, 4045, 4047, 4049, 4050, 4051, 4053, 4057, 4059, 4061, 4063, 4067, 4068, 4071, 4073, 4078, 4082, 4089, 4095, 4097, 4098, 4103, 4104, 4105, 4108, 4109, 4111, 4112, 4114, 4122, 4129, 4134, 4141, 4148, 4151, 4153, 4158, 4159, 4161, 4163, 4164, 4166, 4167, 4171, and 4181.
Embodiment 5. An oligomeric compound comprising a modified oligonucleotide, wherein the modified oligonucleotide consists of 12 to 50 linked nucleosides and has a nucleobase sequence comprising at least 8, 9, 10, 11, 12, 13, 14, 15, 16, 17, 18, 19, or 20 contiguous nucleobases of any of SEQ ID NOs: 88, 91, 92, 97, 98, 100, 101, 103, 105, 107, 109, 111, 114, 116, 119, 120, 121, 124, 168, 169, 170, 172, 179, 180, 184, 188, 191, 195, 196, 197, 201, 242, 245, 246, 249, 250, 252, 253, 254, 255, 257, 261, 262, 268, 269, 270, 272, 273, 274, 319, 321, 322, 324, 325, 326, 327, 328, 329, 333, 334, 336, 338, 345, 349, 350, 354, 362, 365, 384, 387, 392, 405, 406, 408, 421, 425, 432, 434, 435, 441, 444, 451, 461, 462, 463, 468, 469, 472, 484, 487, 488, 493, 494, 500, 503, 507, 508, 511, 515, 517, 518, 531, 533, 534, 543, 556, 557, 558, 559, 563, 569, 578, 587, 596, 600, 604, 609, 612, 614, 615, 616, 628, 631, 633, 638, 642, 645, 648, 651, 652, 658, 659, 667, 671, 678, 679, 680, 683, 689, 690, 697, 699, 700, 708, 712, 715, 717, 723, 724, 730, 735, 739, 740, 744, 746, 749, 750, 753, 755, 758, 763, 764, 769, 770, 771, 772, 773, 776, 781, 789, 792, 794, 795, 798, 805, 808, 809, 813, 816, 817, 818, 825, 833, 835, 836, 837, 844, 845, 848, 849, 850, 852, 853, 859, 865, 887, 895, 896, 901, 906, 909, 912, 914, 927, 930, 940, 943, 946, 952, 959, 961, 962, 963, 969, 971, 980, 981, 994, 1000, 1001, 1005, 1008, 1014, 1015, 1017, 1024, 1033, 1038, 1044, 1050, 1051, 1056, 1061, 1066, 1068, 1070, 1072, 1080, 1083, 1085, 1091, 1092, 1094, 1096, 1097, 1104, 1115, 1119, 1125, 1128, 1130, 1133, 1140, 1147, 1150, 1153, 1156, 1161, 1169, 1170, 1174, 1178, 1179, 1180, 1184, 1186, 1199, 1201, 1206, 1208, 1213, 1217, 1222, 1226, 1229, 1231, 1240, 1245, 1248, 1250, 1255, 1258, 1261, 1262, 1264, 1271, 1273, 1283, 1287, 1289, 1295, 1296, 1299, 1309, 1311, 1313, 1314, 1316, 1322, 1324, 1325, 1326, 1331, 1332, 1333, 1342, 1346, 1348, 1353, 1355, 1357, 1359, 1376, 1377, 1378, 1379, 1390, 1393, 1397, 1399, 1401, 1405, 1409, 1413, 1417, 1420, 1421, 1422, 1436, 1437, 1451, 1453, 1459, 1462, 1468, 1476, 1479, 1483, 1488, 1490, 1492, 1494, 1508, 1512, 1520, 1521, 1524, 1529, 1532, 1535, 1538, 1545, 1547, 1548, 1549, 1554, 1557, 1558, 1567, 1585, 1595, 1596, 1605, 1606, 1620, 1622, 1623, 1626, 1628, 1630, 1636, 1637, 1641, 1653, 1656, 1657, 1658, 1664, 1671, 1672, 1675, 1676, 1678, 1679, 1680, 1691, 1694, 1695, 1696, 1697, 1700, 1702, 1705, 1706, 1712, 1716, 1718, 1719, 1722, 1724, 1732, 1735, 1737, 1751, 1757, 1759, 1765, 1773, 1774, 1779, 1786, 1796, 1800, 1805, 1806, 1807, 1811, 1813, 1816, 1818, 1821, 1824, 1826, 1827, 1832, 1836, 1840, 1842, 1846, 1852, 1854, 1857, 1862, 1864, 1874, 1878, 1886, 1888, 1890, 1892, 1893, 1902, 1903, 1911, 1915, 1924, 1926, 1930, 1933, 1939, 1941, 1951, 1953, 1955, 1959, 1962, 1973, 1974, 1976, 1977, 1982, 1987, 1989, 1990, 1994, 2001, 2003, 2007, 2011, 2013, 2015, 2019, 2038, 2039, 2043, 2065, 2067, 2073, 2099, 2100, 2103, 2105, 2112, 2117, 2123, 2125, 2129, 2130, 2146, 2159, 2161, 2164, 2171, 2173, 2177, 2183, 2185, 2187, and 2195.
Embodiment 6. An oligomeric compound comprising a modified oligonucleotide, wherein the modified oligonucleotide consists of 12 to 50 linked nucleosides and has a nucleobase sequence comprising at least 8, 9, 10, 11, 12, 13, 14, 15, 16, 17, 18, 19, or 20 contiguous nucleobases of any of SEQ ID NOs: 2201, 2202, 2204, 2207, 2216, 2220, 2224, 2230, 2231, 2232, 2234, 2240, 2243, 2246, 2256, 2263, 2268, 2273, 2287, 2291, 2297, 2298, 2300, 2301, 2307, 2309, 2312, 2315, 2321, 2324, 2325, 2333, 2337, 2339, 2356, 2357, 2359, 2360, 2369, 2379, 2388, 2392, 2399, 2403, 2406, 2426, 2430, 2431, 2432, 2436, 2442, 2446, 2459, 2461, 2473, 2476, 2478, 2489, 2502, 2503, 2505, 2512, 2513, 2523, 2526, 2534, 2539, 2540, 2541, 2542, 2544, 2555, 2561, 2562, 2569, 2570, 2572, 2573, 2574, 2581, 2586, 2589, 2590, 2591, 2596, 2616, 2627, 2630, 2640, 2645, 2655, 2665, 2666, 2668, 2671, 2675, 2679, 2683, 2687, 2690, 2691, 2693, 2697, 2699, 2703, 2704, 2707, 2710, 2711, 2712, 2714, 2715, 2721, 2724, 2729, 2730, 2732, 2735, 2745, 2746, 2748, 2749, 2752, 2753, 2754, 2757, 2761, 2763, 2767, 2769, 2771, 2773, 2774, 2777, 2778, 2791, 2794, 2795, 2796, 2807, 2808, 2811, 2812, 2813, 2815, 2817, 2818, 2826, 2831, 2832, 2833, 2836, 2837, 2846, 2847, 2848, 2857, 2867, 2868, 2870, 2871, 2876, 2881, 2882, 2885, 2890, 2896, 2899, 2901, 2906, 2913, 2916, 2920, 2925, 2927, 2933, 2939, 2940, 2942, 2948, 2950, 2957, 2968, 2969, 2974, 2978, 2983, 2984, 2985, 2988, 2989, 3001, 3004, 3006, 3007, 3011, 3016, 3018, 3026, 3039, 3040, 3041, 3044, 3045, 3051, 3052, 3053, 3062, 3064, 3065, 3066, 3067, 3069, 3076, 3081, 3084, 3086, 3088, 3091, 3092, 3094, 3100, 3102, 3110, 3114, 3116, 3117, 3118, 3121, 3123, 3124, 3125, 3129, 3131, 3133, 3135, 3141, 3144, 3146, 3147, 3150, 3151, 3154, 3155, 3158, 3159, 3162, 3163, 3169, 3171, 3172, 3176, 3179, 3180, 3182, 3185, 3186, 3187, 3196, 3200, 3201, 3202, 3205, 3207, 3212, 3213, 3217, 3224, 3228, 3230, 3233, 3236, 3238, 3239, 3240, 3242, 3243, 3245, 3249, 3255, 3263, 3271, 3273, 3274, 3277, 3282, 3283, 3286, 3292, 3294, 3295, 3299, 3300, 3301, 3307, 3308, 3318, 3323, 3328, 3332, 3337, 3341, 3342, 3344, 3345, 3346, 3348, 3350, 3351, 3352, 3353, 3355, 3356, 3357, 3360, 3365, 3366, 3371, 3372, 3374, 3375, 3377, 3378, 3380, 3383, 3384, 3386, 3388, 3393, 3398, 3399, 3400, 3403, 3404, 3406, 3408, 3412, 3415, 3418, 3419, 3422, 3424, 3428, 3429, 3430, 3432, 3444, 3448, 3450, 3451, 3454, 3460, 3471, 3474, 3476, 3477, 3478, 3479, 3480, 3481, 3483, 3485, 3488, 3490, 3491, 3492, 3493, 3496, 3510, 3511, 3515, 3516, 3517, 3520, 3521, 3522, 3524, 3526, 3527, 3528, 3529, 3530, 3532, 3533, 3536, 3539, 3542, 3543, 3544, 3547, 3548, 3550, 3555, 3556, 3557, 3558, 3560, 3564, 3568, 3569, 3574, 3576, 3578, 3583, 3587, 3594, 3602, 3605, 3607, 3612, 3614, 3617, 3627, 3629, 3630, 3634, 3637, 3640, 3641, 3646, 3655, 3656, 3662, 3663, 3665, 3666, 3667, 3670, 3671, 3672, 3678, 3680, 3684, 3686, 3687, 3692, 3693, 3695, 3696, 3698, 3701, 3702, 3705, 3706, 3707, 3709, 3712, 3717, 3719, 3726, 3727, 3729, 3734, 3747, 3753, 3755, 3758, 3784, 3791, 3798, 3800, 3807, 3811, 3814, 3815, 3816, 3817, 3821, 3822, 3824, 3829, 3837, 3852, 3855, 3860, 3863, 3872, 3875, 3876, 3881, 3886, 3892, 3899, 3900, 3902, 3903, 3914, 3918, 3923, 3930, 3938, 3940, 3942, 3945, 3950, 3953, 3955, 3958, 3967, 3970, 3971, 3977, 3978, 3979, 3980, 3987, 3992, 3993, 3994, 4003, 4004, 4005, 4006, 4008, 4010, 4011, 4012, 4013, 4015, 4020, 4021, 4023, 4024, 4025, 4029, 4032, 4034, 4036, 4037, 4038, 4045, 4047, 4049, 4050, 4051, 4053, 4057, 4059, 4061, 4063, 4067, 4068, 4071, 4073, 4078, 4082, 4089, 4095, 4097, 4098, 4103, 4104, 4105, 4108, 4109, 4111, 4112, 4114, 4122, 4129, 4134, 4141, 4148, 4151, 4153, 4158, 4159, 4161, 4163, 4164, 4166, 4167, 4171, and 14181.
Embodiment 7. An oligomeric compound comprising a modified oligonucleotide, wherein the modified oligonucleotide consists of 12 to 50 linked nucleosides and has a nucleobase sequence comprising at least 8, 9, 10, 11, 12, 13, 14, 15, 16, 17, 18, 19, or 20 contiguous nucleobases of any of SEQ ID NOs: 10-355.
Embodiment 8. The oligomeric compound of embodiment 7, wherein the nucleobase sequence comprising at least 8, 9, 10, 11, 12, 13, 14, 15, 16, 17, 18, 19, or 20 contiguous nucleobases of any of SEQ ID NOs: 51, 53, 54, 56, 59, 63, 65, 88, 91, 92, 97, 98, 101, 107, 129, 130, 131, 132, 134, 142, 168, 169, 172, 180, 203, 205, 206, 208, 209, 210, 212, 217, 242, 245, 246, 250, 252, 257, 261, 269, 283, 284, 285, 286, 287, 292, 293, 294, 295, 304, 310, 319, 321, 322, and 324.
Embodiment 9. The oligomeric compound of embodiment 7, wherein the nucleobase sequence comprising at least 8, 9, 10, 11, 12, 13, 14, 15, 16, 17, 18, 19, or 20 contiguous nucleobases of any of SEQ ID NOs: 53, 59, 212, 283, 56, 134, 168, 206, 246, 91, 132, 319, 324, 98, 250, 287, 293, 321, 54, 63, 131, 205, 208, 252, 285, 286, 322, 209, 129, 130, 242, 97, 261, 269, 284, 304, 310, 65, 88, 101, 172, 180, 210, 217, 292, 294, 92, 169, 245, 257, 295, 107, 203, 255, 327, 328, 329, 48, 66, 111, 142, 51, 299, 336, 127, 272, 280, 345, 350, 51, 80, 143, 215, 218, 226, 240, 249, 268, 279, 288, 296, 325, 50, 197, 253, 297, 133, 157, 191, 270, 109, 51, 162, 188, 70, 124, 254, 69, 120, 220, 233, 273, 334, 49, 67, 76, 84, 140, 170, 103, 114, 289, 306, 55, 116, 141, 184, 262, 274, 51, 75, 156, 201, 235, 239, 81, 86, 195, 196, 234, 317, 349, 19, 105, 119, 147, 211, 227, 28, 100, 238, 241, 128, 303, 315, 326, 312, 338, 42, 121, 179, 333, 354, 160, 216, 300, 79, 224, 277, 115, 185, 256, 15, 57, 161, 163, 173, 243, 164, 193, 222, 82, 183, 186, 187, 189, 68, 146, 221, 43, 85, 104, 199, 278, 313, 175, 176, 223, 259, 32, 37, 166, 352, 276, 83, 36, 74, 200, 204, 346, 93, 136, 152, 123, 159, 265, 26, 149, 165, 167, 178, 244, 20, 58, 96, 102, 151, 231, 331, 347, 41, 44, 314, 318, 339, 27, 192, 266, 298, 23, 33, 45, 181, 232, 311, 355, 22, 25, 139, 236, 89, 108, 282, 35, 260, 30, 39, 117, 144, 148, 158, 267, 305, 342, 154, 335, 52, 258, 264, 275, 302, 309, 21, 237, 340, 12, 110, 112, and 337.
Embodiment 10. An oligomeric compound comprising a modified oligonucleotide consisting of 12 to 30 linked nucleosides and having a nucleobase sequence comprising at least 8, at least 9, at least 10, at least 11, at least 12, at least 13, at least 14, at least 15, at least 16, at least 17, at least 18, at least 19, or at least 20 contiguous nucleobases complementary to:
[0066] an equal length portion of nucleobases 4438-4475 of SEQ ID NO: 2;
[0067] an equal length portion of nucleobases 13141-13213 of SEQ ID NO: 2;
[0068] an equal length portion of nucleobases 18114-18146 of SEQ ID NO: 2;
[0069] an equal length portion of nucleobases 18178-18202 of SEQ ID NO: 2;
[0070] an equal length portion of nucleobases 18245-18290 of SEQ ID NO: 2;
[0071] an equal length portion of nucleobases 20249-20330 of SEQ ID NO: 2;
[0072] an equal length portion of nucleobases 23001-23061 of SEQ ID NO: 2;
[0073] an equal length portion of nucleobases 35859-35907 of SEQ ID NO: 2;
[0074] an equal length portion of nucleobases 36200-36315 of SEQ ID NO: 2;
[0075] an equal length portion of nucleobases 37000-37041 of SEQ ID NO: 2;
[0076] an equal length portion of nucleobases 73448-73497 of SEQ ID NO: 2;
[0077] an equal length portion of nucleobases 76851-76900 of SEQ ID NO: 2;
[0078] an equal length portion of nucleobases 89462-89531 of SEQ ID NO: 2;
[0079] an equal length portion of nucleobases 92554-92591 of SEQ ID NO: 2;
[0080] an equal length portion of nucleobases 109563-109628 of SEQ ID NO: 2;
[0081] an equal length portion of nucleobases 116894-116937 of SEQ ID NO: 2 an equal length portion of nucleobases 116894-116951 of SEQ ID NO: 2;
[0082] an equal length portion of nucleobases 118292-118317 of SEQ ID NO: 2;
[0083] an equal length portion of nucleobases 122127-122161 of SEQ ID NO: 2;
[0084] an equal length portion of nucleobases 180800-180823 of SEQ ID NO: 2; or
[0085] an equal length portion of nucleobases 224684-224713 of SEQ ID NO: 2.
   Embodiment 11. An oligomeric compound comprising a modified oligonucleotide consisting of 12 to 30 linked nucleosides and having a nucleobase sequence comprising at least 8, at least 9, at least 10, at least 11, at least 12, at least 13, at least 14, at least 15, at least 16, at least 17, at least 18, at least 19, or at least 20 contiguous nucleobases complementary to:
[0086] an equal length portion of nucleobases 18178-18202 of SEQ ID NO: 2;
[0087] an equal length portion of nucleobases 18245-18290 of SEQ ID NO: 2;
[0088] an equal length portion of nucleobases 73448-73497 of SEQ ID NO: 2;
[0089] an equal length portion of nucleobases 92554-92591 of SEQ ID NO: 2;
[0090] an equal length portion of nucleobases 109563-109628 of SEQ ID NO: 2;
[0091] an equal length portion of nucleobases 116894-116937 of SEQ ID NO: 2;
[0092] an equal length portion of nucleobases 118292-118316 of SEQ ID NO: 2;
[0093] an equal length portion of nucleobases 122127-122161 of SEQ ID NO: 2;
[0094] an equal length portion of nucleobases 180800-180823 of SEQ ID NO: 2; or
[0095] an equal length portion of nucleobases 224684-224713 of SEQ ID NO: 2.
   Embodiment 12. An oligomeric compound comprising a modified oligonucleotide consisting of 12 to 30 linked nucleosides and having a nucleobase sequence comprising at least 8, at least 9, at least 10, at least 11, at least 12, at least 13, at least 14, at least 15, at least 16, at least 17, or at least 18 contiguous nucleobases of a sequence selected from:
[0096] SEQ ID NOs: 19, 203, 422, 478, 583, 603, 706, 1992, 2074, and 2143;
[0097] SEQ ID NOs: 28, 280, 369, 487, 553, 1102, 1168, 1244, 1300, 1416, 1444, 1522, 1645, 1688, 1753, 1887, 1961, 2018, 2120, 3399, and 3430;
[0098] SEQ ID NOs: 129, 206, 450, 577, 611, 688, 801, 820, 900, and 3124;
[0099] SEQ ID NOs: 53, 283, 381, 433, 1906, 2033, 2115, and 2156;
[0100] SEQ ID NOs: 1159, 1272, 1290, 1374, 1472, 1550, and 1610;
[0101] SEQ ID NOs: 37, 54, 55, 56, 131, 132, 133, 208, 209, 210, 284, 285, 286, 287, 1176, 1266, 1301, 1385, 1457, 1533, 1594, 1715, 1799, and 2216;
[0102] SEQ ID NOs: 59, 212, 289, 361, 1145, 1242, 1284, 1423, 1495, 1513, 1638, 1731, 1740, 1823, 1935, 1999, 2054, 2148, 2748, 2817, 2920, and 3015;
[0103] SEQ ID NOs: 1008, 1096, 2857, 2901, 2983, 3044, 3131, 3255, and 3292;
[0104] SEQ ID NOs: 1953, 2015, 2067, 2171, 2230, 2815, 2948, 3006, 3092, 3129, 3245, 3307, 3353, 3464, 3551, 3655, 3726, 3803, 3819, 3899, 4004, 4118, and 4181;
[0105] SEQ ID NOs: 1331, 1405, 3346, 3357, 3488, 3547, and 3634;
[0106] SEQ ID NOs: 62, 139, 215, 216, 292, 356, 506, 560, 650, 673, 774, 831, 918, 1040, 1105, 1197, 1256, 1282, 1428, 1469, 1570, 1657, 2141, and 3979;
[0107] SEQ ID NOs: 63, 1076, 1148, 1260, 1312, 1386, 1440, 1541, 1634, 1674, 1797, 1834, and 1898;
[0108] SEQ ID NOs: 217, 294, 429, 481, 562, 636, 738, 761, 878, 940, 2059, 2167, 2487, and 2507;
[0109] SEQ ID NOs: 65, 218, 295, 526, 619, 694, 766, 862, 945, 978, 1084, 1172, 1276, 1321, and 1395;
[0110] SEQ ID NOs: 66, 296, 377, 627, 701, 760, 815, 919, 1028, 1095, 1151, 1243, 1323, 1354, 1496, 1575, 1646, 1666, 1789, 1828, 1907, 1969, 2093, 2192, and 2611;
[0111] SEQ ID NOs: 69, 222, 299, 412, 1621, 1687, 1792, 1819, 1932, 2006, 2094, and 2135;
[0112] SEQ ID NOs: 69, 222, 299, 412, 1361, 1448, 1563, 1621, 1687, 1792, 1819, 1932, 2006, 2094, and 2135;
[0113] SEQ ID NOs: 744, 837, 943, 971, 1068, and 2690;
[0114] SEQ ID NOs: 699, 764, 850, 906, 1017, 1050, 2784, and 2832;
[0115] SEQ ID NOs: 119, 120, 196, 197, 273, and 350; and SEQ ID NOs: 399, 449, 1704, 1812, 1838, 1957, 1986, 2069, and 2175.
   Embodiment 13. An oligomeric compound comprising a modified oligonucleotide consisting of 12 to 30 linked nucleosides and having a nucleobase sequence comprising at least 8, at least 9, at least 10, at least 11, at least 12, at least 13, at least 14, at least 15, at least 16, at least 17, or at least 18 contiguous nucleobases of a sequence selected from:
[0116] SEQ ID NOs: 53, 283, 381, 433, 1906, 2033, 2115, and 2156;
[0117] SEQ ID NOs: 1159, 1272, 1290, 1374, 1472, 1550, and 1610;
[0118] SEQ ID NOs: 62, 139, 215, 216, 292, 356, 506, 560, 650, 673, 774, 831, 918, 1040, 1105, 1197, 1256, 1282, 1428, 1469, 1570, 1657, and 2141;
[0119] SEQ ID NOs: 65, 218, 295, 526, 619, 694, 766, 862, 945, 978, 1084, 1172, 1276, 1321, and 1395;
[0120] SEQ ID NOs: 66, 296, 377, 627, 701, 760, 815, 919, 1028, 1095, 1151, 1243, 1323, 1354, 1496, 1575, 1646, 1666, 1789, 1828, 1907, 1969, 2093, and 2192;
[0121] SEQ ID NOs: 69, 222, 299, 412, 1621, 1687, 1792, 1819, 1932, 2006, 2094, and 2135;
[0122] SEQ ID NOs: 744, 837, 943, 971, and 1068;
[0123] SEQ ID NOs: 699, 764, 850, 906, 1017, and 1050;
[0124] SEQ ID NOs: 119, 120, 196, 197, 273, and 350; and
[0125] SEQ ID NOs: 399, 449, 1704, 1812, 1838, 1957, 1986, 2069, and 2175.
   Embodiment 14. The oligomeric compound of any one of embodiments 1-13, wherein the modified oligonucleotide has a nucleobase sequence that is at least 80%, 85%, 90%, 95%, or 100% complementary to an equal length portion of a nucleobase sequence selected from SEQ ID NOs: 1-3 when measured across the entire nucleobase sequence of the modified oligonucleotide.
   Embodiment 15. The oligomeric compound of any one of embodiments 1-14, wherein at least one modified nucleoside comprises a modified sugar moiety.
   Embodiment 16. The oligomeric compound of embodiment 15, wherein the modified sugar moiety comprises a bicyclic sugar moiety.
   Embodiment 17. The oligomeric compound of embodiment 16, wherein the bicyclic sugar moiety comprises a 2′-4′ bridge selected from —O—CH₂—; and —O—CH(CH₃)—.
   Embodiment 18. The oligomeric compound of embodiment 15, wherein the modified sugar moiety comprises a non-bicyclic modified sugar moiety.
   Embodiment 19. The oligomeric compound of embodiment 18, wherein the non-bicyclic modified sugar moiety comprises a 2′-MOE sugar moiety or 2′-OMe sugar moiety.
   Embodiment 20. The oligomeric compound of any one of embodiments 1-14, wherein at least one modified nucleoside comprises a sugar surrogate.
   Embodiment 21. The oligomeric compound of embodiment 20, wherein the sugar surrogate is selected from morpholino and PNA.
   Embodiment 22. The oligomeric compound of any of embodiments 1-21, wherein the modified oligonucleotide has a sugar motif comprising:
[0126] a 5′-region consisting of 1-5 linked 5′-region nucleosides;
[0127] a central region consisting of 6-10 linked central region nucleosides; and
[0128] a 3′-region consisting of 1-5 linked 3′-region nucleosides; wherein each of the 5′-region nucleosides and each of the 3′-region nucleosides comprises a modified sugar moiety and each of the central region nucleosides comprises an unmodified 2′-deoxyribosyl sugar moiety.
   Embodiment 23. The oligomeric compound of embodiment 22, wherein the 5′ region consists of 5 linked 5′-region nucleosides; the central region consists of 10 linked central region nucleosides; and the 3′-region consists of 5 linked 3′-region nucleosides; wherein each of the nucleosides of the 5′-region and each of the nucleosides of the 3′-region comprises a 2′-MOE sugar moiety and each of the nucleosides of the central region comprises an unmodified 2′-deoxyribosyl sugar moiety.
   Embodiment 24. The oligomeric compound of embodiment 22, wherein the 5′ region consists of 3 linked 5′-region nucleosides; the central region consists of 10 linked central region nucleosides; and the 3′-region consists of 3 linked 3′-region nucleosides; wherein each of the nucleosides of the 5′-region and each of the nucleosides of the 3′-region comprises a cEt modified sugar moiety and each of the nucleosides of the central region comprises an unmodified 2′-deoxyribosyl sugar moiety.
   Embodiment 25. The oligomeric compound of any one of embodiments 1-24, wherein the modified oligonucleotide comprises at least one modified internucleoside linkage.
   Embodiment 26. The oligomeric compound of embodiment 25, wherein each internucleoside linkage of the modified oligonucleotide is a modified internucleoside linkage.
   Embodiment 27. The oligomeric compound of embodiment 25 or 26 wherein the modified internucleoside linkage is a phosphorothioate internucleoside linkage.
   Embodiment 28. The oligomeric compound of embodiment 25 or 27 wherein the modified oligonucleotide comprises at least one phosphodiester internucleoside linkage.
   Embodiment 29. The oligomeric compound of any of embodiments 25, 27, or 28, wherein each internucleoside linkage is independently selected from a phosphodiester internucleoside linkage or a phosphorothioate internucleoside linkage.
   Embodiment 30. The oligomeric compound of any of embodiments 1-29, wherein the modified oligonucleotide comprises at least one modified nucleobase.
   Embodiment 31. The oligomeric compound of embodiment 30, wherein the modified nucleobase is a 5-methyl cytosine.
   Embodiment 32. The oligomeric compound of any of embodiments 1-31, wherein the modified oligonucleotide consists of 12-30, 12-22, 12-20, 14-20, 15-25, 16-20, 18-22 or 18-20 linked nucleosides.
   Embodiment 33. The oligomeric compound of any of embodiments 1-32, wherein the modified oligonucleotide consists of 20 linked nucleosides.
   Embodiment 34. The oligomeric compound of any of embodiments 1-32, wherein the modified oligonucleotide consists of 16 linked nucleosides.
   Embodiment 35. The oligomeric compound of any of embodiments 1-34, consisting of the modified oligonucleotide.
   Embodiment 36. The oligomeric compound of any of embodiments 1-35, comprising a conjugate group comprising a conjugate moiety and a conjugate linker.
   Embodiment 37. The oligomeric compound of embodiment 36, wherein the conjugate group comprises a GalNAc cluster comprising 1-3 GalNAc ligands.
   Embodiment 38. The oligomeric compound of embodiments 36 or 37, wherein the conjugate linker consists of a single bond.
   Embodiment 39. The oligomeric compound of embodiment 36, wherein the conjugate linker is cleavable.
   Embodiment 40. The oligomeric compound of embodiment 36, wherein the conjugate linker comprises 1-3 linker-nucleosides.
   Embodiment 41. The oligomeric compound of any of embodiments 36-40, wherein the conjugate group is attached to the modified oligonucleotide at the 5′-end of the modified oligonucleotide.
   Embodiment 42. The oligomeric compound of any of embodiments 36-40, wherein the conjugate group is attached to the modified oligonucleotide at the 3′-end of the modified oligonucleotide.
   Embodiment 43. The oligomeric compound of any of embodiments 1-41, comprising a terminal group.
   Embodiment 44. The oligomeric compound of any of embodiments 1-43, wherein the oligomeric compound is a singled-stranded oligomeric compound.
   Embodiment 45. The oligomeric compound of any of embodiments 1-39 or 41-44, wherein the oligomeric compound does not comprise linker-nucleosides.
   Embodiment 46. The oligomeric compound of any one of embodiments 1-45, wherein the modified oligonucleotide of the oligomeric compound is a salt, and wherein the salt is a sodium salt or a potassium salt.
   Embodiment 47. An oligomeric duplex comprising an oligomeric compound of any of embodiments 1-43 or 45-46.
   Embodiment 48. An antisense compound comprising or consisting of an oligomeric compound of any of embodiments 1-46 or an oligomeric duplex of embodiment 47.
   Embodiment 49. A pharmaceutical composition comprising an oligomeric compound of any of embodiments 1-46 or an oligomeric duplex of embodiment 47 and a pharmaceutically acceptable carrier or diluent.
   Embodiment 50. The pharmaceutical composition of embodiment 49, wherein the pharmaceutically acceptable diluent is artificial cerebrospinal fluid or PBS.
   Embodiment 51. The pharmaceutical composition of embodiment 50, wherein the pharmaceutical composition consists essentially of the modified oligonucleotide and artificial cerebrospinal fluid.
   Embodiment 52. A method comprising administering to a subject a pharmaceutical composition of any of embodiments 49-51.
   Embodiment 53. A method of treating a repeat expansion disease comprising administering to an individual having, or at risk for developing, the repeat expansion disease a therapeutically effective amount of a pharmaceutical composition according to any of embodiments 49-51; thereby treating the repeat expansion disease.
   Embodiment 54. A method of reducing MSH3 RNA or MSH3 protein in a subject having or at risk for developing a repeat expansion disease comprising administering a therapeutically effective amount of a pharmaceutical composition according to any of embodiments 49-51; and thereby reducing MSH3 RNA or MSH3 protein in the subject.
   Embodiment 55. A method of reducing MSH3 RNA or MSH3 protein in the central nervous system of a subject having or at risk for developing a repeat expansion disease comprising administering a therapeutically effective amount of a pharmaceutical composition according to any of embodiments 49-51; and thereby reducing MSH3 RNA or MSH3 protein in the central nervous system.
   Embodiment 56. The method of any one of embodiments 53-55, wherein the repeat expansion disease is myotonic dystrophy.
   Embodiment 57. The method of embodiment 56, wherein the myotonic dystrophy is type 1 myotonic dystrophy.
   Embodiment 58. The method of embodiment 56, wherein the myotonic dystrophy is type 2 myotonic dystrophy.
   Embodiment 59. The method of any one of embodiments 53-55, wherein the repeat expansion disease is amyotrophic lateral sclerosis.
   Embodiment 60. The method of any one of embodiments 53-55, wherein the repeat expansion disease is frontotemporal dementia.
   Embodiment 61. The method of any one of embodiments 53-55, wherein the repeat expansion disease is Huntington's disease.
   Embodiment 62. The method of any one of embodiments 53-55, wherein the repeat expansion disease is a polyglutamine disorder.
   Embodiment 63. The method of any one of embodiments 53-55, wherein the repeat expansion disease is a spinocerebellar ataxia.
   Embodiment 64. The method of any one of embodiments 53-55, wherein the repeat expansion disease is Friedreich's ataxia.
   Embodiment 65. The method of any one of embodiments 53-55, wherein the repeat expansion disease is Fragile X syndrome.
   Embodiment 66. The method of any of embodiments 52-65, wherein the administering is by intrathecal administration.
   Embodiment 67. The method of any of embodiments 52-66, wherein at least one symptom or hallmark of the repeat expansion disease is ameliorated.
   Embodiment 68. The method of embodiment 67, wherein the at least one symptom or hallmark is selected from brain atrophy, muscle atrophy, nerve degeneration, uncontrolled movement, seizure, tremors, muscle weakness, muscle cramping, difficulty swallowing, difficulty speaking, anxiety, depression, and combinations thereof.
   Embodiment 69. The method of any of embodiments 52-68, wherein the method prevents or slows disease regression.
   Embodiment 70. A method of reducing MSH3 RNA in a cell comprising contacting the cell with an oligomeric compound according to any of embodiments 1-46, an oligomeric duplex according to embodiment 47, or an antisense compound according to embodiment 48; and thereby reducing MSH3 RNA in the cell.
   Embodiment 71. A method of reducing MSH3 protein in a cell comprising contacting the cell with an oligomeric compound according to any of embodiments 1-46, an oligomeric duplex according to embodiment 47, or an antisense compound according to embodiment 48; and thereby reducing MSH3 protein in the cell.
   Embodiment 72. A method of preventing or slowing an expansion of a repeat region in a cell, the method comprising contacting the cell with an oligomeric compound according to any of embodiments 1-46, an oligomeric duplex according to embodiment 47, or an antisense compound according to embodiment 48.
   Embodiment 73. A method of reducing the number of repeats in a repeat region in a cell, the method comprising contacting the cell with an oligomeric compound according to any of embodiments 1-46, an oligomeric duplex according to embodiment 47, or an antisense compound according to embodiment 48.

### I. Certain Oligonucleotides

[0129] In certain embodiments, provided herein are oligomeric compounds comprising oligonucleotides, which consist of linked nucleosides. Oligonucleotides may be unmodified oligonucleotides (RNA or DNA) or may be modified oligonucleotides. Modified oligonucleotides comprise at least one modification relative to unmodified RNA or DNA. That is, modified oligonucleotides comprise at least one modified nucleoside (comprising a modified sugar moiety and/or a modified nucleobase) and/or at least one modified internucleoside linkage.

[0130] A. Certain Modified Nucleosides

[0131] Modified nucleosides comprise a modified sugar moiety or a modified nucleobase or both a modified sugar moiety and a modified nucleobase.

[0132] 1. Certain Sugar Moieties

[0133] In certain embodiments, modified sugar moieties are non-bicyclic modified sugar moieties. In certain embodiments, modified sugar moieties are bicyclic or tricyclic sugar moieties. In certain embodiments, modified sugar moieties are sugar surrogates. Such sugar surrogates may comprise one or more substitutions corresponding to those of other types of modified sugar moieties.

[0134] In certain embodiments, modified sugar moieties are non-bicyclic modified sugar moieties comprising a furanosyl ring with one or more substituent groups none of which bridges two atoms of the furanosyl ring to form a bicyclic structure. Such non-bridging substituents may be at any position of the furanosyl, including but not limited to substituents at the 2′, 4′, and/or 5′ positions. In certain embodiments one or more non-bridging substituent of non-bicyclic modified sugar moieties is branched. Examples of 2′-substituent groups suitable for non-bicyclic modified sugar moieties include but are not limited to: 2′-F, 2′-OCH₃ (“OMe” or “O-methyl”), and 2′-O(CH₂)₂OCH₃ (“MOE”). In certain embodiments, 2′-substituent groups are selected from among: halo, allyl, amino, azido, SH, CN, OCN, CF₃, OCF₃, O—C₁-C₁₀ alkoxy, O—C₁-C₁₀ substituted alkoxy, O—C₁-C₁₀ alkyl, O—C₁-C₁₀ substituted alkyl, S-alkyl, N(Rₘ)-alkyl, O-alkenyl, S-alkenyl, N(Rₘ)-alkenyl, O-alkynyl, S-alkynyl, N(Rₘ)-alkynyl, O-alkylenyl-O-alkyl, alkynyl, alkaryl, aralkyl, O-alkaryl, O-aralkyl, O(CH₂)₂SCH₃, O(CH₂)₂ON(Rₘ)(Rₙ) or OCH₂C(═O)—N(Rₘ)(Rₙ), where each Rₘ and Rₙ is, independently, H, an amino protecting group, or substituted or unsubstituted C₁-C₁₀ alkyl, and the 2′-substituent groups described in Cook et al., U.S. Pat. No. 6,531,584; Cook et al., U.S. Pat. No. 5,859,221; and Cook et al., U.S. Pat. No. 6,005,087. Certain embodiments of these 2′-substituent groups can be further substituted with one or more substituent groups independently selected from among: hydroxyl, amino, alkoxy, carboxy, benzyl, phenyl, nitro (NO₂), thiol, thioalkoxy, thioalkyl, halogen, alkyl, aryl, alkenyl and alkynyl. Examples of 4′-substituent groups suitable for non-bicyclic modified sugar moieties include but are not limited to alkoxy (e.g., methoxy), alkyl, and those described in Manoharan et al., WO 2015/106128. Examples of 5′-substituent groups suitable for non-bicyclic modified sugar moieties include but are not limited to: 5-methyl (R or S), 5′-vinyl, and 5′-methoxy. In certain embodiments, non-bicyclic modified sugar moieties comprise more than one non-bridging sugar substituent, for example, 2′-F-5′-methyl sugar moieties and the modified sugar moieties and modified nucleosides described in Migawa et al., WO 2008/101157 and Rajeev et al., US2013/0203836.).

[0135] In certain embodiments, a 2′-substituted non-bicyclic modified nucleoside comprises a sugar moiety comprising a non-bridging 2′-substituent group selected from: F, NH₂, N₃, OCF₃, OCH₃, O(CH₂)₃NH₂, CH₂CH═CH₂, OCH₂CH═CH₂, OCH₂CH₂OCH₃, O(CH₂)₂SCH₃, O(CH₂)₂ON(Rₘ)(Rₙ), O(CH₂)₂O(CH₂)₂N(CH₃)₂, and N-substituted acetamide (OCH₂C(═O)—N(Rₘ)(Rₙ)), where each Rₘ and Rₙ is, independently, H, an amino protecting group, or substituted or unsubstituted C₁-C₁₀ alkyl.

[0136] In certain embodiments, a 2′-substituted nucleoside non-bicyclic modified nucleoside comprises a sugar moiety comprising a non-bridging 2′-substituent group selected from: F, OCF₃, OCH₃, OCH₂CH₂OCH₃, O(CH₂)₂SCH₃, O(CH₂)₂ON(CH₃)₂, O(CH₂)₂O(CH₂)₂N(CH₃)₂, and OCH₂C(═O)—N(H)CH₃ (“NMA”).

[0137] In certain embodiments, a 2′-substituted non-bicyclic modified nucleoside comprises a sugar moiety comprising a non-bridging 2′-substituent group selected from: F, OCH₃, and OCH₂CH₂OCH₃.

[0138] Certain modified sugar moieties comprise a substituent that bridges two atoms of the furanosyl ring to form a second ring, resulting in a bicyclic sugar moiety. In certain such embodiments, the bicyclic sugar moiety comprises a bridge between the 4′ and the 2′ furanose ring atoms. Examples of such 4′ to 2′ bridging sugar substituents include but are not limited to: 4′-CH₂-2′, 4′-(CH₂)₂-2′, 4′-(CH₂)₃-2′, 4′-CH₂—O-2′ (“LNA”), 4′-CH₂—S-2′, 4′-(CH₂)₂—O-2′ (“ENA”), 4′-CH(CH₃)—O-2′ (referred to as “constrained ethyl” or “cEt”), 4′-CH₂—O—CH₂-2′, 4′-CH₂—N(R)-2′, 4′-CH(CH₂OCH₃)—O-2′ (“constrained MOE” or “cMOE”) and analogs thereof (see, e.g., Seth et al., U.S. Pat. No. 7,399,845, Bhat et al., U.S. Pat. No. 7,569,686, Swayze et al., U.S. Pat. No. 7,741,457, and Swayze et al., U.S. Pat. No. 8,022,193), 4′-C(CH₃)(CH₃)—O-2′ and analogs thereof (see, e.g., Seth et al., U.S. Pat. No. 8,278,283), 4′-CH₂—N(OCH₃)-2′ and analogs thereof (see, e.g., Prakash et al., U.S. Pat. No. 8,278,425), 4′-CH₂—O—N(CH₃)-2′ (see, e.g., Allerson et al., U.S. Pat. No. 7,696,345 and Allerson et al., U.S. Pat. No. 8,124,745), 4′-CH₂—C(H)(CH₃)-2′ (see, e.g., Zhou, et al., J. Org. Chem., 2009, 74, 118-134), 4′-CH₂—C(═CH₂)-2′ and analogs thereof (see e.g., Seth et al., U.S. Pat. No. 8,278,426), 4′-C(RₐR_{b})—N(R)—O-2′, 4′-C(RₐR_{b})—O—N(R)-2′, 4′-CH₂—O—N(R)-2′, and 4′-CH₂—N(R)—O- 2′, wherein each R, Rₐ, and R_{b} is, independently, H, a protecting group, or C₁-C₁₂ alkyl (see, e.g. Imanishi et al., U.S. Pat. No. 7,427,672).

[0139] In certain embodiments, such 4′ to 2′ bridges independently comprise from 1 to 4 linked groups independently selected from: —[C(Rₐ)(R_{b})]ₙ—, —[C(Rₐ)(R_{b})]ₙ—O—, —C(Rₐ)═C(R_{b})—, —C(Rₐ)═N—, —C(═NRₐ)—, —C(═O)—, —C(═S)—, —O—, —Si(Rₐ)₂—, —S(═O)ₓ—, and —N(Rₐ)—;

[0140] wherein:

[0141] x is 0, 1, or 2;

[0142] n is 1, 2, 3, or 4;

[0143] each Rₐ and R_{b} is, independently, H, a protecting group, hydroxyl, C₁-C₁₂ alkyl, substituted C₁-C₁₂ alkyl, C₂-C₁₂ alkenyl, substituted C₂-C₁₂ alkenyl, C₂-C₁₂ alkynyl, substituted C₂-C₁₂ alkynyl, C₅-C₂₀ aryl, substituted C₅-C₂₀ aryl, heterocycle radical, substituted heterocycle radical, heteroaryl, substituted heteroaryl, C₅-C₇ alicyclic radical, substituted C₅-C₇ alicyclic radical, halogen, OJ₁, NJ₁J₂, SJ₁, N₃, COOJ₁, acyl (C(═O)—H), substituted acyl, CN, sulfonyl (S(═O)₂-J₁), or sulfoxyl (S(═O)-J₁); and

[0144] each J₁ and J₂ is, independently, H, C₁-C₁₂ alkyl, substituted C₁-C₁₂ alkyl, C₂-C₁₂ alkenyl, substituted C₂-C₁₂ alkenyl, C₂-C₁₂ alkynyl, substituted C₂-C₁₂ alkynyl, C₅-C₂₀ aryl, substituted C₅-C₂₀ aryl, acyl (C(═O)—H), substituted acyl, a heterocycle radical, a substituted heterocycle radical, C₁-C₁₂ aminoalkyl, substituted C₁-C₁₂ aminoalkyl, or a protecting group.

[0145] Additional bicyclic sugar moieties are known in the art, see, for example: Freier et al., Nucleic Acids Research, 1997, 25(22), 4429-4443, Albaek et al., J. Org. Chem., 2006, 71, 7731-7740, Singh et al., Chem. Commun., 1998, 4, 455-456; Koshkin et al., Tetrahedron, 1998, 54, 3607-3630; Kumar et al., Bioorg. Med. Chem. Lett., 1998, 8, 2219-2222; Singh et al., J. Org. Chem., 1998, 63, 10035-10039; Srivastava et al., J. Am. Chem. Soc., 2007, 129, 8362-8379; Wengel et al., U.S. Pat. No. 7,053,207; Imanishi et al., U.S. Pat. No. 6,268,490; Imanishi et al. U.S. Pat. No. 6,770,748; Imanishi et al., U.S. Pat. No. RE44,779; Wengel et al., U.S. Pat. No. 6,794,499; Wengel et al., U.S. Pat. No. 6,670,461; Wengel et al., U.S. Pat. No. 7,034,133; Wengel et al., U.S. Pat. No. 8,080,644; Wengel et al., U.S. Pat. No. 8,034,909; Wengel et al., U.S. Pat. No. 8,153,365; Wengel et al., U.S. Pat. No. 7,572,582; and Ramasamy et al., U.S. Pat. No. 6,525,191; Torsten et al., WO 2004/106356; Wengel et al., WO 1999/014226; Seth et al., WO 2007/134181; Seth et al., U.S. Pat. No. 7,547,684; Seth et al., U.S. Pat. No. 7,666,854; Seth et al., U.S. Pat. No. 8,088,746; Seth et al., U.S. Pat. No. 7,750,131; Seth et al., U.S. Pat. No. 8,030,467; Seth et al., U.S. Pat. No. 8,268,980; Seth et al., U.S. Pat. No. 8,546,556; Seth et al., U.S. Pat. No. 8,530,640; Migawa et al., U.S. Pat. No. 9,012,421; Seth et al., U.S. Pat. No. 8,501,805; and U.S. Patent Publication Nos. Allerson et al., US2008/0039618 and Migawa et al., US2015/0191727.

[0146] In certain embodiments, bicyclic sugar moieties and nucleosides incorporating such bicyclic sugar moieties are further defined by isomeric configuration. For example, an LNA nucleoside (described herein) may be in the α-L configuration or in the β-D configuration.

[chemical structure]

α-L-methyleneoxy (4′-CH₂—O-2′) or α-L-LNA bicyclic nucleosides have been incorporated into oligonucleotides that showed antisense activity (Frieden et al., Nucleic Acids Research, 2003, 21, 6365-6372). Herein, general descriptions of bicyclic nucleosides include both isomeric configurations. When the positions of specific bicyclic nucleosides (e.g., LNA or cEt) are identified in exemplified embodiments herein, they are in the β-D configuration, unless otherwise specified.

[0147] In certain embodiments, modified sugar moieties comprise one or more non-bridging sugar substituent and one or more bridging sugar substituent (e.g., 5′-substituted and 4′-2′ bridged sugars).

[0148] In certain embodiments, modified sugar moieties are sugar surrogates. In certain such embodiments, the oxygen atom of the sugar moiety is replaced, e.g., with a sulfur, carbon or nitrogen atom. In certain such embodiments, such modified sugar moieties also comprise bridging and/or non-bridging substituents as described herein. For example, certain sugar surrogates comprise a 4′-sulfur atom and a substitution at the 2′-position (see, e.g., Bhat et al., U.S. Pat. No. 7,875,733 and Bhat et al., U.S. Pat. No. 7,939,677) and/or the 5′ position.

[0149] In certain embodiments, sugar surrogates comprise rings having other than 5 atoms. For example, in certain embodiments, a sugar surrogate comprises a six-membered tetrahydropyran (“THP”). Such tetrahydropyrans may be further modified or substituted. Nucleosides comprising such modified tetrahydropyrans include but are not limited to hexitol nucleic acid (“HNA”), anitol nucleic acid (“ANA”), manitol nucleic acid (“MNA”) (see, e.g., Leumann, C J. Bioorg. & Med. Chem. 2002, 10, 841-854), fluoro HNA:

[chemical structure]

(“F-HNA”, see e.g. Swayze et al., U.S. Pat. No. 8,088,904; Swayze et al., U.S. Pat. No. 8,440,803; Swayze et al., U.S. Pat. No. 8,796,437; and Swayze et al., U.S. Pat. No. 9,005,906; F-HNA can also be referred to as a F-THP or 3′-fluoro tetrahydropyran), and nucleosides comprising additional modified THP compounds having the formula:

[chemical structure]

wherein, independently, for each of said modified THP nucleoside:

[0150] Bx is a nucleobase moiety;

[0151] T₃ and T₄ are each, independently, an internucleoside linking group linking the modified THP nucleoside to the remainder of an oligonucleotide or one of T₃ and T₄ is an internucleoside linking group linking the modified THP nucleoside to the remainder of an oligonucleotide and the other of T₃ and T₄ is H, a hydroxyl protecting group, a linked conjugate group, or a 5′ or 3′-terminal group;

q₁, q₂, q₃, q₄, q₅, q₆ and q₇ are each, independently, H, C₁-C₆ alkyl, substituted C₁-C₆ alkyl, C₂-C₆ alkenyl, substituted C₂-C₆ alkenyl, C₂-C₆ alkynyl, or substituted C₂-C₆ alkynyl; and

[0152] each of R₁ and R₂ is independently selected from among: hydrogen, halogen, substituted or unsubstituted alkoxy, NJ₁J₂, SJ₁, N₃, OC(═X)J₁, OC(═X)NJ₁J₂, NJ₃C(═X)NJ₁J₂, and CN, wherein X is O, S or NJ₁, and each J₁, J₂, and J₃ is, independently, H or C₁-C₆ alkyl.

[0153] In certain embodiments, modified THP nucleosides are provided wherein q₁, q₂, q₃, q₄, q₅, q₆ and q₇ are each H. In certain embodiments, at least one of q₁, q₂, q₃, q₄, q₅, q₆ and q₇ is other than H. In certain embodiments, at least one of q₁, q₂, q₃, q₄, q₅, q₆ and q₇ is methyl. In certain embodiments, modified THP nucleosides are provided wherein one of R₁ and R₂ is F. In certain embodiments, R₁ is F and R₂ is H, in certain embodiments, R₁ is methoxy and R₂ is H, and in certain embodiments, R₁ is methoxyethoxy and R₂ is H.

[0154] In certain embodiments, sugar surrogates comprise rings having more than 5 atoms and more than one heteroatom. For example, nucleosides comprising morpholino sugar moieties and their use in oligonucleotides have been reported (see, e.g., Braasch et al., Biochemistry, 2002, 41, 4503-4510 and Summerton et al., U.S. Pat. No. 5,698,685; Summerton et al., U.S. Pat. No. 5,166,315; Summerton et al., U.S. Pat. No. 5,185,444; and Summerton et al., U.S. Pat. No. 5,034,506). As used here, the term “morpholino” means a sugar surrogate having the following structure:

[chemical structure]

In certain embodiments, morpholinos may be modified, for example by adding or altering various substituent groups from the above morpholino structure. Such sugar surrogates are referred to herein as “modified morpholinos.”

[0155] In certain embodiments, sugar surrogates comprise acyclic moieties. Examples of nucleosides and oligonucleotides comprising such acyclic sugar surrogates include but are not limited to: peptide nucleic acid (“PNA”), acyclic butyl nucleic acid (see, e.g., Kumar et al., Org. Biomol. Chem., 2013, 11, 5853-5865), and nucleosides and oligonucleotides described in Manoharan et al., WO2011/133876.

[0156] Many other bicyclic and tricyclic sugar and sugar surrogate ring systems are known in the art that can be used in modified nucleosides.

[0157] 2. Certain Modified Nucleobases

[0158] In certain embodiments, modified oligonucleotides comprise one or more nucleoside comprising an unmodified nucleobase. In certain embodiments, modified oligonucleotides comprise one or more nucleoside comprising a modified nucleobase. In certain embodiments, modified oligonucleotides comprise one or more nucleoside that does not comprise a nucleobase, referred to as an abasic nucleoside.

[0159] In certain embodiments, modified nucleobases are selected from: 5-substituted pyrimidines, 6-azapyrimidines, alkyl or alkynyl substituted pyrimidines, alkyl substituted purines, and N-2, N-6 and O-6 substituted purines. In certain embodiments, modified nucleobases are selected from: 2-aminopropyladenine, 5-hydroxymethyl cytosine, xanthine, hypoxanthine, 2-aminoadenine, 6-N-methylguanine, 6-N-methyladenine, 2-propyladenine, 2-thiouracil, 2-thiothymine and 2-thiocytosine, 5-propynyl (—C≡C—CH₃) uracil, 5-propynylcytosine, 6-azouracil, 6-azocytosine, 6-azothymine, 5-ribosyluracil (pseudouracil), 4-thiouracil, 8-halo, 8-amino, 8-thiol, 8-thioalkyl, 8-hydroxyl, 8-aza and other 8-substituted purines, 5-halo, particularly 5-bromo, 5-trifluoromethyl, 5-halouracil, and 5-halocytosine, 7-methylguanine, 7-methyladenine, 2-F-adenine, 2-aminoadenine, 7-deazaguanine, 7-deazaadenine, 3-deazaguanine, 3-deazaadenine, 6-N-benzoyladenine, 2-N-isobutyrylguanine, 4-N-benzoylcytosine, 4-N-benzoyluracil, 5-methyl 4-N-benzoylcytosine, 5-methyl 4-N-benzoyluracil, universal bases, hydrophobic bases, promiscuous bases, size-expanded bases, and fluorinated bases. Further modified nucleobases include tricyclic pyrimidines, such as 1,3-diazaphenoxazine-2-one, 1,3-diazaphenothiazine-2-one and 9-(2-aminoethoxy)-1,3-diazaphenoxazine-2-one (G-clamp). Modified nucleobases may also include those in which the purine or pyrimidine base is replaced with other heterocycles, for example 7-deaza-adenine, 7-deazaguanosine, 2-aminopyridine and 2-pyridone. Further nucleobases include those disclosed in Merigan et al., U.S. Pat. No. 3,687,808, those disclosed in The Concise Encyclopedia Of Polymer Science And Engineering, Kroschwitz, J. I., Ed., John Wiley & Sons, 1990, 858-859; Englisch et al., Angewandte Chemie, International Edition, 1991, 30, 613; Sanghvi, Y. S., Chapter 15, Antisense Research and Applications, Crooke, S. T. and Lebleu, B., Eds., CRC Press, 1993, 273-288; and those disclosed in Chapters 6 and 15, Antisense Drug Technology, Crooke S. T., Ed., CRC Press, 2008, 163-166 and 442-443.

[0160] Publications that teach the preparation of certain of the above noted modified nucleobases as well as other modified nucleobases include without limitation, Manoharan et al., US2003/0158403; Manoharan et al., US2003/0175906; Dinh et al., U.S. Pat. No. 4,845,205; Spielvogel et al., U.S. Pat. No. 5,130,302; Rogers et al., U.S. Pat. No. 5,134,066; Bischofberger et al., U.S. Pat. No. 5,175,273; Urdea et al., U.S. Pat. No. 5,367,066; Benner et al., U.S. Pat. No. 5,432,272; Matteucci et al., U.S. Pat. No. 5,434,257; Gmeiner et al., U.S. Pat. No. 5,457,187; Cook et al., U.S. Pat. No. 5,459,255; Froehler et al., U.S. Pat. No. 5,484,908; Matteucci et al., U.S. Pat. No. 5,502,177; Hawkins et al., U.S. Pat. No. 5,525,711; Haralambidis et al., U.S. Pat. No. 5,552,540; Cook et al., U.S. Pat. No. 5,587,469; Froehler et al., U.S. Pat. No. 5,594,121; Switzer et al., U.S. Pat. No. 5,596,091; Cook et al., U.S. Pat. No. 5,614,617; Froehler et al., U.S. Pat. No. 5,645,985; Cook et al., U.S. Pat. No. 5,681,941; Cook et al., U.S. Pat. No. 5,811,534; Cook et al., U.S. Pat. No. 5,750,692; Cook et al., U.S. Pat. No. 5,948,903; Cook et al., U.S. Pat. No. 5,587,470; Cook et al., U.S. Pat. No. 5,457,191; Matteucci et al., U.S. Pat. No. 5,763,588; Froehler et al., U.S. Pat. No. 5,830,653; Cook et al., U.S. Pat. No. 5,808,027; Cook et al., 6,166,199; and Matteucci et al., U.S. Pat. No. 6,005,096.

[0161] 3. Certain Modified Internucleoside Linkages

[0162] In certain embodiments, nucleosides of modified oligonucleotides may be linked together using any internucleoside linkage. The two main classes of internucleoside linking groups are defined by the presence or absence of a phosphorus atom. Representative phosphorus-containing internucleoside linkages include but are not limited to phosphates, which contain a phosphodiester bond (“P═O”) (also referred to as unmodified or naturally occurring linkages), phosphotriesters, methylphosphonates, phosphoramidates, and phosphorothioates (“P═S”), and phosphorodithioates (“HS—P═S”). Representative non-phosphorus containing internucleoside linking groups include but are not limited to methylenemethylimino (—CH₂—N(CH₃)—O—CH₂—), thiodiester, thionocarbamate (—O—C(═O)(NH)—S—); siloxane (—O—SiH₂—O—); and N,N′-dimethylhydrazine (—CH₂—N(CH₃)—N(CH₃)—). In certain embodiments, a modified internucleoside linkage is any of those described in WO 2021/030778. Modified internucleoside linkages, compared to naturally occurring phosphate linkages, can be used to alter, typically increase, nuclease resistance of the oligonucleotide. In certain embodiments, internucleoside linkages having a chiral atom can be prepared as a racemic mixture, or as separate enantiomers. Methods of preparation of phosphorous-containing and non-phosphorous-containing internucleoside linkages are well known to those skilled in the art.

[0163] Representative internucleoside linkages having a chiral center include but are not limited to alkylphosphonates and phosphorothioates. Modified oligonucleotides comprising internucleoside linkages having a chiral center can be prepared as populations of modified oligonucleotides comprising stereorandom internucleoside linkages, or as populations of modified oligonucleotides comprising phosphorothioate linkages in particular stereochemical configurations. In certain embodiments, populations of modified oligonucleotides comprise phosphorothioate internucleoside linkages wherein all of the phosphorothioate internucleoside linkages are stereorandom. Such modified oligonucleotides can be generated using synthetic methods that result in random selection of the stereochemical configuration of each phosphorothioate linkage. Nonetheless, as is well understood by those of skill in the art, each individual phosphorothioate of each individual oligonucleotide molecule has a defined stereoconfiguration. In certain embodiments, populations of modified oligonucleotides are enriched for modified oligonucleotides comprising one or more particular phosphorothioate internucleoside linkages in a particular, independently selected stereochemical configuration. In certain embodiments, the particular configuration of the particular phosphorothioate linkage is present in at least 65% of the molecules in the population. In certain embodiments, the particular configuration of the particular phosphorothioate linkage is present in at least 70% of the molecules in the population. In certain embodiments, the particular configuration of the particular phosphorothioate linkage is present in at least 80% of the molecules in the population. In certain embodiments, the particular configuration of the particular phosphorothioate linkage is present in at least 90% of the molecules in the population. In certain embodiments, the particular configuration of the particular phosphorothioate linkage is present in at least 99% of the molecules in the population. Such chirally enriched populations of modified oligonucleotides can be generated using synthetic methods known in the art, e.g., methods described in Oka et al., JACS 125, 8307 (2003), Wan et al. Nuc. Acid. Res. 42, 13456 (2014), and WO 2017/015555. In certain embodiments, a population of modified oligonucleotides is enriched for modified oligonucleotides having at least one indicated phosphorothioate in the (Sp) configuration. In certain embodiments, a population of modified oligonucleotides is enriched for modified oligonucleotides having at least one phosphorothioate in the (Rp) configuration. In certain embodiments, modified oligonucleotides comprising (Rp) and/or (Sp) phosphorothioates comprise one or more of the following formulas, respectively, wherein “B” indicates a nucleobase:

[chemical structure]

Unless otherwise indicated, chiral internucleoside linkages of modified oligonucleotides described herein can be stereorandom or in a particular stereochemical configuration.

[0164] Neutral internucleoside linkages include, without limitation, phosphotriesters, methylphosphonates, MMI (3′-CH₂—N(CH₃)—O-5′), amide-3 (3′-CH₂—C(═O)—N(H)-5′), amide-4 (3′-CH₂—N(H)—C(═O)-5′), formacetal (3′-O—CH₂—O-5′), methoxypropyl, and thioformacetal (3′-S—CH₂—O-5′). Further neutral internucleoside linkages include nonionic linkages comprising siloxane (dialkylsiloxane), carboxylate ester, carboxamide, sulfide, sulfonate ester and amides (See for example: Carbohydrate Modifications in Antisense Research; Y. S. Sanghvi and P. D. Cook, Eds., ACS Symposium Series 580; Chapters 3 and 4, 40-65). Further neutral internucleoside linkages include nonionic linkages comprising mixed N, O, S and CH₂ component parts.

[0165] B. Certain Motifs

[0166] In certain embodiments, modified oligonucleotides comprise one or more modified nucleosides comprising a modified sugar moiety. In certain embodiments, modified oligonucleotides comprise one or more modified nucleosides comprising a modified nucleobase. In certain embodiments, modified oligonucleotides comprise one or more modified internucleoside linkage. In such embodiments, the modified, unmodified, and differently modified sugar moieties, nucleobases, and/or internucleoside linkages of a modified oligonucleotide define a pattern or motif. In certain embodiments, the patterns of sugar moieties, nucleobases, and internucleoside linkages are each independent of one another. Thus, a modified oligonucleotide may be described by its sugar motif, nucleobase motif and/or internucleoside linkage motif (as used herein, nucleobase motif describes the modifications to the nucleobases independent of the sequence of nucleobases).

[0167] 1. Certain Sugar Motifs

[0168] In certain embodiments, oligonucleotides comprise one or more type of modified sugar and/or unmodified sugar moiety arranged along the oligonucleotide or region thereof in a defined pattern or sugar motif. In certain instances, such sugar motifs include but are not limited to any of the sugar modifications discussed herein.

[0169] In certain embodiments, modified oligonucleotides comprise or consist of a region having a gapmer motif, which is defined by two external regions or “wings” and a central or internal region or “gap.” The three regions of a gapmer motif (the 5′-wing, the gap, and the 3′-wing) form a contiguous sequence of nucleosides wherein at least some of the sugar moieties of the nucleosides of each of the wings differ from at least some of the sugar moieties of the nucleosides of the gap. Specifically, at least the sugar moieties of the nucleosides of each wing that are closest to the gap (the 3′-most nucleoside of the 5′-wing and the 5′-most nucleoside of the 3′-wing) differ from the sugar moiety of the neighboring gap nucleosides, thus defining the boundary between the wings and the gap (i.e., the wing/gap junction). In certain embodiments, the sugar moieties within the gap are the same as one another. In certain embodiments, the gap includes one or more nucleoside having a sugar moiety that differs from the sugar moiety of one or more other nucleosides of the gap. In certain embodiments, the sugar motifs of the two wings are the same as one another (symmetric gapmer). In certain embodiments, the sugar motif of the 5′-wing differs from the sugar motif of the 3′-wing (asymmetric gapmer).

[0170] In certain embodiments, the wings of a gapmer comprise 1-5 nucleosides. In certain embodiments, each nucleoside of each wing of a gapmer is a modified nucleoside. In certain embodiments, at least one nucleoside of each wing of a gapmer is a modified nucleoside. In certain embodiments, at least two nucleosides of each wing of a gapmer are modified nucleosides. In certain embodiments, at least three nucleosides of each wing of a gapmer are modified nucleosides. In certain embodiments, at least four nucleosides of each wing of a gapmer are modified nucleosides.

[0171] In certain embodiments, the gap of a gapmer comprises 7-12 nucleosides. In certain embodiments, each nucleoside of the gap of a gapmer is an unmodified 2′-deoxynucleoside. In certain embodiments, at least one nucleoside of the gap of a gapmer is a modified nucleoside.

[0172] In certain embodiments, the gapmer is a deoxy gapmer. In certain embodiments, the nucleosides on the gap side of each wing/gap junction are unmodified 2′-deoxynucleosides and the nucleosides on the wing sides of each wing/gap junction are modified nucleosides. In certain embodiments, each nucleoside of the gap is an unmodified 2′-deoxynucleoside. In certain embodiments, each nucleoside of each wing of a gapmer is a modified nucleoside.

[0173] In certain embodiments, modified oligonucleotides comprise or consist of a region having a fully modified sugar motif. In such embodiments, each nucleoside of the fully modified region of the modified oligonucleotide comprises a modified sugar moiety. In certain embodiments, each nucleoside of the entire modified oligonucleotide comprises a modified sugar moiety. In certain embodiments, modified oligonucleotides comprise or consist of a region having a fully modified sugar motif, wherein each nucleoside within the fully modified region comprises the same modified sugar moiety, referred to herein as a uniformly modified sugar motif. In certain embodiments, a fully modified oligonucleotide is a uniformly modified oligonucleotide. In certain embodiments, each nucleoside of a uniformly modified comprises the same 2′-modification.

[0174] Herein, the lengths (number of nucleosides) of the three regions of a gapmer may be provided using the notation [# of nucleosides in the 5′-wing]-[# of nucleosides in the gap]-[# of nucleosides in the 3′-wing]. Thus, a 5-10-5 gapmer consists of 5 linked nucleosides in each wing and 10 linked nucleosides in the gap. Where such nomenclature is followed by a specific modification, that modification is the modification in each sugar moiety of each wing and the gap nucleosides comprise unmodified deoxynucleosides sugars. Thus, a 5-10-5 MOE gapmer consists of 5 linked MOE modified nucleosides in the 5′-wing, 10 linked deoxynucleosides in the gap, and 5 linked MOE nucleosides in the 3′-wing.

[0175] In certain embodiments, modified oligonucleotides are 5-10-5 MOE gapmers. In certain embodiments, modified oligonucleotides are 3-10-3 BNA gapmers. In certain embodiments, modified oligonucleotides are 3-10-3 cEt gapmers. In certain embodiments, modified oligonucleotides are 3-10-3 LNA gapmers.

[0176] In certain embodiments, modified oligonucleotides have a sugar motif selected from 5′ to 3′: eeeeeddddddddddeeeee; wherein each “d” represents a 2′-β-D-deoxyribosyl sugar moiety, and each “e” represents a 2′-MOE sugar moiety.

[0177] In certain embodiments, modified oligonucleotides have the sugar motif from 5′ to 3′: kkkddddddddddkkk; wherein each “d” represents a 2′-β-D-deoxyribosyl sugar moiety, and each “k” represents a cEt modified sugar moiety.

[0178] 2. Certain Nucleobase Motifs

[0179] In certain embodiments, oligonucleotides comprise modified and/or unmodified nucleobases arranged along the oligonucleotide or region thereof in a defined pattern or motif. In certain embodiments, each nucleobase is modified. In certain embodiments, none of the nucleobases are modified. In certain embodiments, each purine or each pyrimidine is modified. In certain embodiments, each adenine is modified. In certain embodiments, each guanine is modified. In certain embodiments, each thymine is modified. In certain embodiments, each uracil is modified. In certain embodiments, each cytosine is modified. In certain embodiments, some or all of the cytosine nucleobases in a modified oligonucleotide are 5-methyl cytosines. In certain embodiments, all of the cytosine nucleobases are 5-methyl cytosines and all of the other nucleobases of the modified oligonucleotide are unmodified nucleobases.

[0180] In certain embodiments, modified oligonucleotides comprise a block of modified nucleobases. In certain such embodiments, the block is at the 3′-end of the oligonucleotide. In certain embodiments the block is within 3 nucleosides of the 3′-end of the oligonucleotide. In certain embodiments, the block is at the 5′-end of the oligonucleotide. In certain embodiments the block is within 3 nucleosides of the 5′-end of the oligonucleotide.

[0181] In certain embodiments, oligonucleotides having a gapmer motif comprise a nucleoside comprising a modified nucleobase. In certain such embodiments, one nucleoside comprising a modified nucleobase is in the central gap of an oligonucleotide having a gapmer motif. In certain such embodiments, the sugar moiety of said nucleoside is a 2′-deoxyribosyl moiety. In certain embodiments, the modified nucleobase is selected from: a 2-thiopyrimidine and a 5-propynepyrimidine.

[0182] 3. Certain Internucleoside Linkage Motifs

[0183] In certain embodiments, oligonucleotides comprise modified and/or unmodified internucleoside linkages arranged along the oligonucleotide or region thereof in a defined pattern or motif. In certain embodiments, each internucleoside linking group is a phosphodiester internucleoside linkage (P═O). In certain embodiments, each internucleoside linking group of a modified oligonucleotide is a phosphorothioate internucleoside linkage (P═S). In certain embodiments, each internucleoside linkage of a modified oligonucleotide is independently selected from a phosphorothioate internucleoside linkage and phosphodiester internucleoside linkage. In certain embodiments, each phosphorothioate internucleoside linkage is independently selected from a stereorandom phosphorothioate a (Sp) phosphorothioate, and a (Rp) phosphorothioate. In certain embodiments, the sugar motif of a modified oligonucleotide is a gapmer and the internucleoside linkages within the gap are all modified. In certain such embodiments, some or all of the internucleoside linkages in the wings are unmodified phosphodiester internucleoside linkages. In certain embodiments, the terminal internucleoside linkages are modified. In certain embodiments, the sugar motif of a modified oligonucleotide is a gapmer, and the internucleoside linkage motif comprises at least one phosphodiester internucleoside linkage in at least one wing, wherein the at least one phosphodiester linkage is not a terminal internucleoside linkage, and the remaining internucleoside linkages are phosphorothioate internucleoside linkages. In certain such embodiments, all of the phosphorothioate linkages are stereorandom. In certain embodiments, all of the phosphorothioate linkages in the wings are (Sp) phosphorothioates, and the gap comprises at least one Sp, Sp, Rp motif. In certain embodiments, populations of modified oligonucleotides are enriched for modified oligonucleotides comprising such internucleoside linkage motifs.

[0184] In certain embodiments, modified oligonucleotides have an internucleoside linkage motif of (5′ to 3′): sssssssssssssss, wherein each “s” represents a phosphorothioate internucleoside linkage. In certain embodiments, modified oligonucleotides have an internucleoside linkage motif of (5′ to 3′): sssssssssssssssssss, wherein each “s” represents a phosphorothioate internucleoside linkage. In certain embodiments, modified oligonucleotides have an internucleoside linkage motif of (5′ to 3′): sooosssssssssssooss, wherein each “s” represents a phosphorothioate internucleoside linkage and each “o” represents a phosphodiester internucleoside linkage.

[0185] C. Certain Lengths

[0186] It is possible to increase or decrease the length of an oligonucleotide without eliminating activity. For example, in Woolf et al. (Proc. Natl. Acad. Sci. USA 89:7305-7309, 1992), a series of oligonucleotides 13-25 nucleobases in length were tested for their ability to induce cleavage of a target RNA in an oocyte injection model. Oligonucleotides 25 nucleobases in length with 8 or 11 mismatch bases near the ends of the oligonucleotides were able to direct specific cleavage of the target RNA, albeit to a lesser extent than the oligonucleotides that contained no mismatches. Similarly, target specific cleavage was achieved using 13 nucleobase oligonucleotides, including those with 1 or 3 mismatches.

[0187] In certain embodiments, oligonucleotides (including modified oligonucleotides) can have any of a variety of ranges of lengths. In certain embodiments, oligonucleotides consist of X to Y linked nucleosides, where X represents the fewest number of nucleosides in the range and Y represents the largest number nucleosides in the range. In certain such embodiments, X and Y are each independently selected from 8, 9, 10, 11, 12, 13, 14, 15, 16, 17, 18, 19, 20, 21, 22, 23, 24, 25, 26, 27, 28, 29, 30, 31, 32, 33, 34, 35, 36, 37, 38, 39, 40, 41, 42, 43, 44, 45, 46, 47, 48, 49, and 50; provided that X≤Y. For example, in certain embodiments, oligonucleotides consist of 12 to 13, 12 to 14, 12 to 15, 12 to 16, 12 to 17, 12 to 18, 12 to 19, 12 to 20, 12 to 21, 12 to 22, 12 to 23, 12 to 24, 12 to 25, 12 to 26, 12 to 27, 12 to 28, 12 to 29, 12 to 30, 13 to 14, 13 to 15, 13 to 16, 13 to 17, 13 to 18, 13 to 19, 13 to 20, 13 to 21, 13 to 22, 13 to 23, 13 to 24, 13 to 25, 13 to 26, 13 to 27, 13 to 28, 13 to 29, 13 to 30, 14 to 15, 14 to 16, 14 to 17, 14 to 18, 14 to 19, 14 to 20, 14 to 21, 14 to 22, 14 to 23, 14 to 24, 14 to 25, 14 to 26, 14 to 27, 14 to 28, 14 to 29, 14 to 30, 15 to 16, 15 to 17, 15 to 18, 15 to 19, 15 to 20, 15 to 21, 15 to 22, 15 to 23, 15 to 24, 15 to 25, 15 to 26, 15 to 27, 15 to 28, 15 to 29, 15 to 30, 16 to 17, 16 to 18, 16 to 19, 16 to 20, 16 to 21, 16 to 22, 16 to 23, 16 to 24, 16 to 25, 16 to 26, 16 to 27, 16 to 28, 16 to 29, 16 to 30, 17 to 18, 17 to 19, 17 to 20, 17 to 21, 17 to 22, 17 to 23, 17 to 24, 17 to 25, 17 to 26, 17 to 27, 17 to 28, 17 to 29, 17 to 30, 18 to 19, 18 to 20, 18 to 21, 18 to 22, 18 to 23, 18 to 24, 18 to 25, 18 to 26, 18 to 27, 18 to 28, 18 to 29, 18 to 30, 19 to 20, 19 to 21, 19 to 22, 19 to 23, 19 to 24, 19 to 25, 19 to 26, 19 to 29, 19 to 28, 19 to 29, 19 to 30, 20 to 21, 20 to 22, 20 to 23, 20 to 24, 20 to 25, 20 to 26, 20 to 27, 20 to 28, 20 to 29, 20 to 30, 21 to 22, 21 to 23, 21 to 24, 21 to 25, 21 to 26, 21 to 27, 21 to 28, 21 to 29, 21 to 30, 22 to 23, 22 to 24, 22 to 25, 22 to 26, 22 to 27, 22 to 28, 22 to 29, 22 to 30, 23 to 24, 23 to 25, 23 to 26, 23 to 27, 23 to 28, 23 to 29, 23 to 30, 24 to 25, 24 to 26, 24 to 27, 24 to 28, 24 to 29, 24 to 30, 25 to 26, 25 to 27, 25 to 28, 25 to 29, 25 to 30, 26 to 27, 26 to 28, 26 to 29, 26 to 30, 27 to 28, 27 to 29, 27 to 30, 28 to 29, 28 to 30, or 29 to 30 linked nucleosides.

[0188] D. Certain Modified Oligonucleotides

[0189] In certain embodiments, the above modifications (sugar, nucleobase, internucleoside linkage) are incorporated into a modified oligonucleotide. In certain embodiments, modified oligonucleotides are characterized by their modification motifs and overall lengths. In certain embodiments, such parameters are each independent of one another. Thus, unless otherwise indicated, each internucleoside linkage of an oligonucleotide having a gapmer sugar motif may be modified or unmodified and may or may not follow the gapmer modification pattern of the sugar modifications. For example, the internucleoside linkages within the wing regions of a sugar gapmer may be the same or different from one another and may be the same or different from the internucleoside linkages of the gap region of the sugar motif. Likewise, such sugar gapmer oligonucleotides may comprise one or more modified nucleobase independent of the gapmer pattern of the sugar modifications. Unless otherwise indicated, all modifications are independent of nucleobase sequence.

[0190] E. Certain Populations of Modified Oligonucleotides

[0191] Populations of modified oligonucleotides in which all of the modified oligonucleotides of the population have the same molecular formula can be stereorandom populations or chirally enriched populations. All of the chiral centers of all of the modified oligonucleotides are stereorandom in a stereorandom population. In a chirally enriched population, at least one particular chiral center is not stereorandom in the modified oligonucleotides of the population. In certain embodiments, the modified oligonucleotides of a chirally enriched population are enriched for β-D ribosyl sugar moieties, and all of the phosphorothioate internucleoside linkages are stereorandom. In certain embodiments, the modified oligonucleotides of a chirally enriched population are enriched for both β-D ribosyl sugar moieties and at least one, particular phosphorothioate internucleoside linkage in a particular stereochemical configuration.

[0192] F. Nucleobase Sequence

[0193] In certain embodiments, oligonucleotides (unmodified or modified oligonucleotides) are further described by their nucleobase sequence. In certain embodiments oligonucleotides have a nucleobase sequence that is complementary to a second oligonucleotide or an identified reference nucleic acid, such as a target nucleic acid. In certain such embodiments, a region of an oligonucleotide has a nucleobase sequence that is complementary to a second oligonucleotide or an identified reference nucleic acid, such as a target nucleic acid. In certain embodiments, the nucleobase sequence of a region or entire length of an oligonucleotide is at least 50%, at least 60%, at least 70%, at least 80%, at least 85%, at least 90%, at least 95%, or 100% complementary to the second oligonucleotide or nucleic acid, such as a target nucleic acid.

### II. Certain Oligomeric Compounds

[0194] In certain embodiments, provided herein are oligomeric compounds, which consist of an oligonucleotide (modified or unmodified) and optionally one or more conjugate groups and/or terminal groups. Conjugate groups consist of one or more conjugate moiety and a conjugate linker which links the conjugate moiety to the oligonucleotide. Conjugate groups may be attached to either or both ends of an oligonucleotide and/or at any internal position. In certain embodiments, conjugate groups are attached to the 2′-position of a nucleoside of a modified oligonucleotide. In certain embodiments, conjugate groups that are attached to either or both ends of an oligonucleotide are terminal groups. In certain such embodiments, conjugate groups or terminal groups are attached at the 3′ and/or 5′-end of oligonucleotides. In certain such embodiments, conjugate groups (or terminal groups) are attached at the 3′-end of oligonucleotides. In certain embodiments, conjugate groups are attached near the 3′-end of oligonucleotides. In certain embodiments, conjugate groups (or terminal groups) are attached at the 5′-end of oligonucleotides. In certain embodiments, conjugate groups are attached near the 5′-end of oligonucleotides.

[0195] Examples of terminal groups include but are not limited to conjugate groups, capping groups, phosphate moieties, protecting groups, modified or unmodified nucleosides, and two or more nucleosides that are independently modified or unmodified.

[0196] A. Certain Conjugate Groups

[0197] In certain embodiments, oligonucleotides are covalently attached to one or more conjugate groups. In certain embodiments, conjugate groups modify one or more properties of the attached oligonucleotide, including but not limited to pharmacodynamics, pharmacokinetics, stability, binding, absorption, tissue distribution, cellular distribution, cellular uptake, charge and clearance. In certain embodiments, conjugate groups impart a new property on the attached oligonucleotide, e.g., fluorophores or reporter groups that enable detection of the oligonucleotide. Certain conjugate groups and conjugate moieties have been described previously, for example: cholesterol moiety (Letsinger et al., Proc. Natl. Acad. Sci. USA, 1989, 86, 6553-6556), cholic acid (Manoharan et al., Bioorg. Med. Chem. Lett., 1994, 4, 1053-1060), a thioether, e.g., hexyl-S-tritylthiol (Manoharan et al., Ann. N.Y. Acad. Sci., 1992, 660, 306-309; Manoharan et al., Bioorg. Med. Chem. Lett., 1993, 3, 2765-2770), a thiocholesterol (Oberhauser et al., Nucl. Acids Res., 1992, 20, 533-538), an aliphatic chain, e.g., do-decan-diol or undecyl residues (Saison-Behmoaras et al., EMBO J., 1991, 10, 1111-1118; Kabanov et al., FEBS Lett., 1990, 259, 327-330; Svinarchuk et al., Biochimie, 1993, 75, 49-54), a phospholipid, e.g., di-hexadecyl-rac-glycerol or triethyl-ammonium 1,2-di-O-hexadecyl-rac-glycero-3-H-phosphonate (Manoharan et al., Tetrahedron Lett., 1995, 36, 3651-3654; Shea et al., Nucl. Acids Res., 1990, 18, 3777-3783), a polyamine or a polyethylene glycol chain (Manoharan et al., Nucleosides & Nucleotides, 1995, 14, 969-973), or adamantane acetic acid a palmityl moiety (Mishra et al., Biochim. Biophys. Acta, 1995, 1264, 229-237), an octadecylamine or hexylamino-carbonyl-oxycholesterol moiety (Crooke et al., J. Pharmacol. Exp. Ther., 1996, 277, 923-937), a tocopherol group (Nishina et al., Molecular Therapy Nucleic Acids, 2015, 4, e220; and Nishina et al., Molecular Therapy, 2008, 16, 734-740), or a GalNAc cluster (e.g., WO2014/179620).

[0198] 1. Conjugate Moieties

[0199] Conjugate moieties include, without limitation, intercalators, reporter molecules, polyamines, polyamides, peptides, carbohydrates, vitamin moieties, polyethylene glycols, thioethers, polyethers, cholesterols, thiocholesterols, cholic acid moieties, folate, lipids, phospholipids, biotin, phenazine, phenanthridine, anthraquinone, adamantane, acridine, fluoresceins, rhodamines, coumarins, fluorophores, and dyes.

[0200] In certain embodiments, a conjugate moiety comprises an active drug substance, for example, aspirin, warfarin, phenylbutazone, ibuprofen, suprofen, fen-bufen, ketoprofen, (S)-(+)-pranoprofen, carprofen, dansylsarcosine, 2,3,5-triiodobenzoic acid, fingolimod, flufenamic acid, folinic acid, a benzothiadiazide, chlorothiazide, a diazepine, indo-methicin, a barbiturate, a cephalosporin, a sulfa drug, an antidiabetic, an antibacterial or an antibiotic.

[0201] 2. Conjugate Linkers

[0202] Conjugate moieties are attached to oligonucleotides through conjugate linkers. In certain oligomeric compounds, the conjugate linker is a single chemical bond (i.e., the conjugate moiety is attached directly to an oligonucleotide through a single bond). In certain embodiments, the conjugate linker comprises a chain structure, such as a hydrocarbyl chain, or an oligomer of repeating units such as ethylene glycol, nucleosides, or amino acid units.

[0203] In certain embodiments, a conjugate linker comprises one or more groups selected from alkyl, amino, oxo, amide, disulfide, polyethylene glycol, ether, thioether, and hydroxylamino. In certain such embodiments, the conjugate linker comprises groups selected from alkyl, amino, oxo, amide and ether groups. In certain embodiments, the conjugate linker comprises groups selected from alkyl and amide groups. In certain embodiments, the conjugate linker comprises groups selected from alkyl and ether groups. In certain embodiments, the conjugate linker comprises at least one phosphorus moiety. In certain embodiments, the conjugate linker comprises at least one phosphate group. In certain embodiments, the conjugate linker includes at least one neutral linking group.

[0204] In certain embodiments, conjugate linkers, including the conjugate linkers described above, are bifunctional linking moieties, e.g., those known in the art to be useful for attaching conjugate groups to parent compounds, such as the oligonucleotides provided herein. In general, a bifunctional linking moiety comprises at least two functional groups. One of the functional groups is selected to bind to a particular site on a parent compound and the other is selected to bind to a conjugate group. Examples of functional groups used in a bifunctional linking moiety include but are not limited to electrophiles for reacting with nucleophilic groups and nucleophiles for reacting with electrophilic groups. In certain embodiments, bifunctional linking moieties comprise one or more groups selected from amino, hydroxyl, carboxylic acid, thiol, alkyl, alkenyl, and alkynyl.

[0205] Examples of conjugate linkers include but are not limited to pyrrolidine, 8-amino-3,6-dioxaoctanoic acid (ADO), succinimidyl 4-(N-maleimidomethyl)cyclohexane-1-carboxylate (SMCC) and 6-aminohexanoic acid (AHEX or AHA). Other conjugate linkers include but are not limited to substituted or unsubstituted C₁-C₁₀ alkyl, substituted or unsubstituted C₂-C₁₀ alkenyl or substituted or unsubstituted C₂-C₁₀ alkynyl, wherein a nonlimiting list of preferred substituent groups includes hydroxyl, amino, alkoxy, carboxy, benzyl, phenyl, nitro, thiol, thioalkoxy, halogen, alkyl, aryl, alkenyl and alkynyl.

[0206] In certain embodiments, conjugate linkers comprise 1-10 linker-nucleosides. In certain embodiments, conjugate linkers comprise 2-5 linker-nucleosides. In certain embodiments, conjugate linkers comprise exactly 3 linker-nucleosides. In certain embodiments, conjugate linkers comprise the TCA motif. In certain embodiments, such linker-nucleosides are modified nucleosides. In certain embodiments such linker-nucleosides comprise a modified sugar moiety. In certain embodiments, linker-nucleosides are unmodified. In certain embodiments, linker-nucleosides comprise an optionally protected heterocyclic base selected from a purine, substituted purine, pyrimidine or substituted pyrimidine. In certain embodiments, a cleavable moiety is a nucleoside selected from uracil, thymine, cytosine, 4-N-benzoylcytosine, 5-methyl cytosine, 4-N-benzoyl-5-methyl cytosine, adenine, 6-N-benzoyladenine, guanine and 2-N-isobutyrylguanine. It is typically desirable for linker-nucleosides to be cleaved from the oligomeric compound after it reaches a target tissue. Accordingly, linker-nucleosides are typically linked to one another and to the remainder of the oligomeric compound through cleavable bonds. In certain embodiments, such cleavable bonds are phosphodiester bonds.

[0207] Herein, linker-nucleosides are not considered to be part of the oligonucleotide. Accordingly, in embodiments in which an oligomeric compound comprises an oligonucleotide consisting of a specified number or range of linked nucleosides and/or a specified percent complementarity to a reference nucleic acid and the oligomeric compound also comprises a conjugate group comprising a conjugate linker comprising linker-nucleosides, those linker-nucleosides are not counted toward the length of the oligonucleotide and are not used in determining the percent complementarity of the oligonucleotide for the reference nucleic acid. For example, an oligomeric compound may comprise (1) a modified oligonucleotide consisting of 8-30 nucleosides and (2) a conjugate group comprising 1-10 linker-nucleosides that are contiguous with the nucleosides of the modified oligonucleotide. The total number of contiguous linked nucleosides in such an oligomeric compound is more than 30. Alternatively, an oligomeric compound may comprise a modified oligonucleotide consisting of 8-30 nucleosides and no conjugate group. The total number of contiguous linked nucleosides in such an oligomeric compound is no more than 30. Unless otherwise indicated conjugate linkers comprise no more than 10 linker-nucleosides. In certain embodiments, conjugate linkers comprise no more than 5 linker-nucleosides. In certain embodiments, conjugate linkers comprise no more than 3 linker-nucleosides. In certain embodiments, conjugate linkers comprise no more than 2 linker-nucleosides. In certain embodiments, conjugate linkers comprise no more than 1 linker-nucleoside.

[0208] In certain embodiments, it is desirable for a conjugate group to be cleaved from the oligonucleotide. For example, in certain circumstances oligomeric compounds comprising a particular conjugate moiety are better taken up by a particular cell type, but once the oligomeric compound has been taken up, it is desirable that the conjugate group be cleaved to release the unconjugated or parent oligonucleotide. Thus, certain conjugate linkers may comprise one or more cleavable moieties. In certain embodiments, a cleavable moiety is a cleavable bond. In certain embodiments, a cleavable moiety is a group of atoms comprising at least one cleavable bond. In certain embodiments, a cleavable moiety comprises a group of atoms having one, two, three, four, or more than four cleavable bonds. In certain embodiments, a cleavable moiety is selectively cleaved inside a cell or subcellular compartment, such as a lysosome. In certain embodiments, a cleavable moiety is selectively cleaved by endogenous enzymes, such as nucleases.

[0209] In certain embodiments, a cleavable bond is selected from among: an amide, an ester, an ether, one or both esters of a phosphodiester, a phosphate ester, a carbamate, or a disulfide. In certain embodiments, a cleavable bond is one or both of the esters of a phosphodiester. In certain embodiments, a cleavable moiety comprises a phosphate or phosphodiester. In certain embodiments, the cleavable moiety is a phosphate linkage between an oligonucleotide and a conjugate moiety or conjugate group.

[0210] In certain embodiments, a cleavable moiety comprises or consists of one or more linker-nucleosides. In certain such embodiments, the one or more linker-nucleosides are linked to one another and/or to the remainder of the oligomeric compound through cleavable bonds. In certain embodiments, such cleavable bonds are unmodified phosphodiester bonds. In certain embodiments, a cleavable moiety is 2′-deoxynucleoside that is attached to either the 3′ or 5′-terminal nucleoside of an oligonucleotide by a phosphate internucleoside linkage and covalently attached to the remainder of the conjugate linker or conjugate moiety by a phosphate or phosphorothioate linkage. In certain such embodiments, the cleavable moiety is 2′-deoxyadenosine.

[0211] B. Certain Terminal Groups

[0212] In certain embodiments, oligomeric compounds comprise one or more terminal groups. In certain such embodiments, oligomeric compounds comprise a stabilized 5′-phophate. Stabilized 5′-phosphates include, but are not limited to 5′-phosphanates, including, but not limited to 5′-vinylphosphonates. In certain embodiments, terminal groups comprise one or more abasic nucleosides and/or inverted nucleosides. In certain embodiments, terminal groups comprise one or more 2′-linked nucleosides. In certain such embodiments, the 2′-linked nucleoside is an abasic nucleoside.

### III. Oligomeric Duplexes

[0213] In certain embodiments, oligomeric compounds described herein comprise an oligonucleotide, having a nucleobase sequence complementary to that of a target nucleic acid. In certain embodiments, an oligomeric compound is paired with a second oligomeric compound to form an oligomeric duplex. Such oligomeric duplexes comprise a first oligomeric compound having a region complementary to a target nucleic acid and a second oligomeric compound having a region complementary to the first oligomeric compound. In certain embodiments, the first oligomeric compound of an oligomeric duplex comprises or consists of (1) a modified or unmodified oligonucleotide and optionally a conjugate group and (2) a second modified or unmodified oligonucleotide and optionally a conjugate group. Either or both oligomeric compounds of an oligomeric duplex may comprise a conjugate group. The oligonucleotides of each oligomeric compound of an oligomeric duplex may include non-complementary overhanging nucleosides.

### IV. Antisense Activity

[0214] In certain embodiments, oligomeric compounds and oligomeric duplexes are capable of hybridizing to a target nucleic acid, resulting in at least one antisense activity; such oligomeric compounds and oligomeric duplexes are antisense compounds. In certain embodiments, antisense compounds have antisense activity when they reduce or inhibit the amount or activity of a target nucleic acid by 25% or more in the standard cell assay. In certain embodiments, antisense compounds selectively affect one or more target nucleic acid. Such antisense compounds comprise a nucleobase sequence that hybridizes to one or more target nucleic acid, resulting in one or more desired antisense activity and does not hybridize to one or more non-target nucleic acid or does not hybridize to one or more non-target nucleic acid in such a way that results in significant undesired antisense activity.

[0215] In certain antisense activities, hybridization of an antisense compound to a target nucleic acid results in recruitment of a protein that cleaves the target nucleic acid. For example, certain antisense compounds result in RNase H mediated cleavage of the target nucleic acid. RNase H is a cellular endonuclease that cleaves the RNA strand of an RNA:DNA duplex. The DNA in such an RNA:DNA duplex need not be unmodified DNA. In certain embodiments, described herein are antisense compounds that are sufficiently “DNA-like” to elicit RNase H activity. In certain embodiments, one or more non-DNA-like nucleoside in the gap of a gapmer is tolerated.

[0216] In certain antisense activities, an antisense compound or a portion of an antisense compound is loaded into an RNA-induced silencing complex (RISC), ultimately resulting in cleavage of the target nucleic acid. For example, certain antisense compounds result in cleavage of the target nucleic acid by Argonaute. Antisense compounds that are loaded into RISC are RNAi compounds. RNAi compounds may be double-stranded (siRNA) or single-stranded (ssRNA).

[0217] In certain embodiments, hybridization of an antisense compound to a target nucleic acid does not result in recruitment of a protein that cleaves that target nucleic acid. In certain embodiments, hybridization of the antisense compound to the target nucleic acid results in alteration of splicing of the target nucleic acid. In certain embodiments, hybridization of an antisense compound to a target nucleic acid results in inhibition of a binding interaction between the target nucleic acid and a protein or other nucleic acid. In certain embodiments, hybridization of an antisense compound to a target nucleic acid results in alteration of translation of the target nucleic acid.

[0218] Antisense activities may be observed directly or indirectly. In certain embodiments, observation or detection of an antisense activity involves observation or detection of a change in an amount of a target nucleic acid or protein encoded by such target nucleic acid, a change in the ratio of splice variants of a nucleic acid or protein and/or a phenotypic change in a cell or subject.

### V. Certain Target Nucleic Acids

[0219] In certain embodiments, oligomeric compounds comprise or consist of an oligonucleotide comprising a region that is complementary to a target nucleic acid. In certain embodiments, the target nucleic acid is an endogenous RNA molecule. In certain embodiments, the target nucleic acid encodes a protein. In certain such embodiments, the target nucleic acid is selected from: a mature mRNA and a pre-mRNA, including intronic, exonic and untranslated regions. In certain embodiments, the target RNA is a mature mRNA. In certain embodiments, the target nucleic acid is a pre-mRNA. In certain such embodiments, the target region is entirely within an intron. In certain embodiments, the target region spans an intron/exon junction. In certain embodiments, the target region is at least 50% within an intron. In certain embodiments, the target nucleic acid is the RNA transcriptional product of a retrogene. In certain embodiments, the target nucleic acid is a non-coding RNA. In certain such embodiments, the target non-coding RNA is selected from: a long non-coding RNA, a short non-coding RNA, an intronic RNA molecule.

[0220] A. Complementarity/Mismatches to the Target Nucleic Acid

[0221] It is possible to introduce mismatch bases without eliminating activity. For example, Gautschi et al (J. Natl. Cancer Inst. 93:463-471, March 2001) demonstrated the ability of an oligonucleotide having 100% complementarity to the bcl-2 mRNA and having 3 mismatches to the bcl-xL mRNA to reduce the expression of both bcl-2 and bcl-xL in vitro and in vivo. Furthermore, this oligonucleotide demonstrated potent anti-tumor activity in vivo. Maher and Dolnick (Nuc. Acid. Res. 16:3341-3358, 1988) tested a series of tandem 14 nucleobase oligonucleotides, and a 28 and 42 nucleobase oligonucleotides comprised of the sequence of two or three of the tandem oligonucleotides, respectively, for their ability to arrest translation of human DHFR in a rabbit reticulocyte assay. Each of the three 14 nucleobase oligonucleotides alone was able to inhibit translation, albeit at a more modest level than the 28 or 42 nucleobase oligonucleotides.

[0222] In certain embodiments, oligonucleotides are complementary to the target nucleic acid over the entire length of the oligonucleotide. In certain embodiments, oligonucleotides are 99%, 95%, 90%, 85%, or 80% complementary to the target nucleic acid. In certain embodiments, oligonucleotides are at least 80% complementary to the target nucleic acid over the entire length of the oligonucleotide and comprise a region that is 100% or fully complementary to a target nucleic acid. In certain embodiments, the region of full complementarity is from 6 to 20, 10 to 18, or 18 to 20 nucleobases in length.

[0223] In certain embodiments, oligonucleotides comprise one or more mismatched nucleobases relative to the target nucleic acid. In certain embodiments, antisense activity against the target is reduced by such mismatch, but activity against a non-target is reduced by a greater amount. Thus, in certain embodiments selectivity of the oligonucleotide is improved. In certain embodiments, the mismatch is specifically positioned within an oligonucleotide having a gapmer motif. In certain embodiments, the mismatch is at position 1, 2, 3, 4, 5, 6, 7, or 8 from the 5′-end of the gap region. In certain embodiments, the mismatch is at position 9, 8, 7, 6, 5, 4, 3, 2, 1 from the 3′-end of the gap region. In certain embodiments, the mismatch is at position 1, 2, 3, or 4 from the 5′-end of the wing region. In certain embodiments, the mismatch is at position 4, 3, 2, or 1 from the 3′-end of the wing region.

[0224] B. MSH3

[0225] In certain embodiments, oligomeric compounds comprise or consist of an oligonucleotide comprising a region that is complementary to a MSH3 nucleic acid. In certain embodiments, the MSH3 nucleic acid has the sequence set forth in SEQ ID NO: 1 (GENBANK Accession No. NM_002439.4). In certain embodiments, the MSH3 nucleic acid has the sequence set forth in SEQ ID NO: 2 (GENBANK Accession No. NC_000005.10 truncated from nucleotides 80652001 to 80880000). In certain embodiments, the MSH3 nucleic acid has the sequence set forth in SEQ ID NO: 3 (GENBANK Accession No. NM_002439.1).

[0226] In certain embodiments an oligomeric compound complementary to SEQ ID NO: 1, SEQ ID NO: 2, or SEQ ID NO: 3 is capable of reducing a MSH3 RNA in a cell. In certain embodiments an oligomeric compound complementary to SEQ ID NO: 1, SEQ ID NO: 2, or SEQ ID NO: 3 is capable of reducing MSH3 protein in a cell. In certain embodiments, the cell is in vitro. In certain embodiments, the cell is in a subject. In certain embodiments, the oligomeric compound consists of a modified oligonucleotide. In certain embodiments, an oligomeric compound complementary to SEQ ID NO: 1, SEQ ID NO: 2, or SEQ ID NO:3 is capable of ameliorating one or more symptom or hallmark of a repeat expansion disease when it is introduced to a cell in a subject. In certain embodiments, the repeat expansion disease is myotonic dystrophy (DM1 and DM2), amyotrophic lateral sclerosis, frontotemporal dementia, Huntington's disease, various polyglutamine disorders, ataxias (e.g., Friedrich's ataxia), spinocerebellar ataxia (e.g., SCA1, SCA2, SCA3, SCA6, SCAT, SCAB, SCA10, or SCA17), or Fragile X syndrome. In certain embodiments, the one or more symptoms or hallmarks are selected from brain atrophy, muscle atrophy, nerve degeneration, uncontrolled movement, seizure, tremors, muscle weakness, muscle cramping, difficulty swallowing, difficulty speaking, decreased memory, decreased cognition, anxiety, and depression, and combinations thereof.

[0227] In certain embodiments, an oligomeric compound complementary to SEQ ID NO: 1, SEQ ID NO: 2, or SEQ ID NO: 3 is capable of reducing a detectable amount of MSH3 RNA in the CSF of a subject when the oligomeric compound is administered to the CSF of the subject. The detectable amount of MSH3 RNA may be reduced by at least 10%, at least 20%, at least 30%, at least 40%, at least 50%, at least 60%, at least 70%, at least 80%, or at least 90%. In certain embodiments, an oligomeric compound complementary to SEQ ID NO: 1, SEQ ID NO: 2, or SEQ ID NO: 3 is capable of reducing a detectable amount of MSH3 protein in the CSF of the subject when the oligomeric compound is administered to the CSF of the subject. The detectable amount of MSH3 protein may be reduced by at least 10%, at least 20%, at least 30%, at least 40%, at least 50%, at least 60%, at least 70%, at least 80%, or at least 90%.

[0228] C. Certain Target Nucleic Acids in Certain Tissues

[0229] In certain embodiments, oligomeric compounds comprise or consist of an oligonucleotide comprising a region that is complementary to a target nucleic acid, wherein the target nucleic acid is expressed in a pharmacologically relevant tissue. In certain embodiments, the pharmacologically relevant tissues are the cells and tissues that comprise the central nervous system (CNS). Such tissues include brain tissues, such as, cortex, substantia nigra, striatum, midbrain, and brainstem and spinal cord.

### IV. Certain Pharmaceutical Compositions

[0230] In certain embodiments, described herein are pharmaceutical compositions comprising one or more oligomeric compounds. In certain embodiments, the one or more oligomeric compounds each consists of a modified oligonucleotide. In certain embodiments, the pharmaceutical composition comprises a pharmaceutically acceptable diluent or carrier. In certain embodiments, a pharmaceutical composition comprises or consists of a sterile saline solution and one or more oligomeric compound. In certain embodiments, the sterile saline is pharmaceutical grade saline. In certain embodiments, a pharmaceutical composition comprises or consists of one or more oligomeric compound and sterile water. In certain embodiments, the sterile water is pharmaceutical grade water. In certain embodiments, a pharmaceutical composition comprises or consists of one or more oligomeric compound and phosphate-buffered saline (PBS). In certain embodiments, the sterile PBS is pharmaceutical grade PBS. In certain embodiments, a pharmaceutical composition comprises or consists of one or more oligomeric compound and artificial cerebrospinal fluid. In certain embodiments, the artificial cerebrospinal fluid is pharmaceutical grade.

[0231] In certain embodiments, a pharmaceutical composition comprises a modified oligonucleotide and artificial cerebrospinal fluid. In certain embodiments, a pharmaceutical composition consists of a modified oligonucleotide and artificial cerebrospinal fluid. In certain embodiments, a pharmaceutical composition consists essentially of a modified oligonucleotide and artificial cerebrospinal fluid. In certain embodiments, the artificial cerebrospinal fluid is pharmaceutical grade.

[0232] In certain embodiments, pharmaceutical compositions comprise one or more oligomeric compound and one or more excipients. In certain embodiments, excipients are selected from water, salt solutions, alcohol, polyethylene glycols, gelatin, lactose, amylase, magnesium stearate, talc, silicic acid, viscous paraffin, hydroxymethylcellulose and polyvinylpyrrolidone.

[0233] In certain embodiments, oligomeric compounds may be admixed with pharmaceutically acceptable active and/or inert substances for the preparation of pharmaceutical compositions or formulations. Compositions and methods for the formulation of pharmaceutical compositions depend on a number of criteria, including, but not limited to, route of administration, extent of disease, or dose to be administered.

[0234] In certain embodiments, pharmaceutical compositions comprising an oligomeric compound encompass any pharmaceutically acceptable salts of the oligomeric compound, esters of the oligomeric compound, or salts of such esters. In certain embodiments, pharmaceutical compositions comprising oligomeric compounds comprising one or more oligonucleotide, upon administration to a subject, including a human, are capable of providing (directly or indirectly) the biologically active metabolite or residue thereof. Accordingly, for example, the disclosure is also drawn to pharmaceutically acceptable salts of oligomeric compounds, prodrugs, pharmaceutically acceptable salts of such prodrugs, and other bioequivalents. Suitable pharmaceutically acceptable salts include, but are not limited to, sodium and potassium salts. In certain embodiments, prodrugs comprise one or more conjugate group attached to an oligonucleotide, wherein the conjugate group is cleaved by endogenous nucleases within the body.

[0235] Lipid moieties have been used in nucleic acid therapies in a variety of methods. In certain such methods, the nucleic acid, such as an oligomeric compound, is introduced into preformed liposomes or lipoplexes made of mixtures of cationic lipids and neutral lipids. In certain methods, DNA complexes with mono- or poly-cationic lipids are formed without the presence of a neutral lipid. In certain embodiments, a lipid moiety is selected to increase distribution of a pharmaceutical agent to a particular cell or tissue. In certain embodiments, a lipid moiety is selected to increase distribution of a pharmaceutical agent to fat tissue. In certain embodiments, a lipid moiety is selected to increase distribution of a pharmaceutical agent to muscle tissue.

[0236] In certain embodiments, pharmaceutical compositions comprise a delivery system. Examples of delivery systems include, but are not limited to, liposomes and emulsions. Certain delivery systems are useful for preparing certain pharmaceutical compositions including those comprising hydrophobic compounds. In certain embodiments, certain organic solvents such as dimethylsulfoxide are used.

[0237] In certain embodiments, pharmaceutical compositions comprise one or more tissue-specific delivery molecules designed to deliver the one or more pharmaceutical agents of the present invention to specific tissues or cell types. For example, in certain embodiments, pharmaceutical compositions include liposomes coated with a tissue-specific antibody.

[0238] In certain embodiments, pharmaceutical compositions comprise a co-solvent system. Certain of such co-solvent systems comprise, for example, benzyl alcohol, a nonpolar surfactant, a water-miscible organic polymer, and an aqueous phase. In certain embodiments, such co-solvent systems are used for hydrophobic compounds. A non-limiting example of such a co-solvent system is the VPD co-solvent system, which is a solution of absolute ethanol comprising 3% w/v benzyl alcohol, 8% w/v of the nonpolar surfactant Polysorbate 80™ and 65% w/v polyethylene glycol 300. The proportions of such co-solvent systems may be varied considerably without significantly altering their solubility and toxicity characteristics. Furthermore, the identity of co-solvent components may be varied: for example, other surfactants may be used instead of Polysorbate 80™; the fraction size of polyethylene glycol may be varied; other biocompatible polymers may replace polyethylene glycol, e.g., polyvinyl pyrrolidone; and other sugars or polysaccharides may substitute for dextrose.

[0239] In certain embodiments, pharmaceutical compositions are prepared for oral administration. In certain embodiments, pharmaceutical compositions are prepared for buccal administration. In certain embodiments, a pharmaceutical composition is prepared for administration by injection (e.g., intravenous, subcutaneous, intramuscular, intrathecal (IT), intracerebroventricular (ICV), etc.). In certain of such embodiments, a pharmaceutical composition comprises a carrier and is formulated in aqueous solution, such as water or physiologically compatible buffers such as Hanks's solution, Ringer's solution, or physiological saline buffer. In certain embodiments, other ingredients are included (e.g., ingredients that aid in solubility or serve as preservatives). In certain embodiments, injectable suspensions are prepared using appropriate liquid carriers, suspending agents and the like. Certain pharmaceutical compositions for injection are presented in unit dosage form, e.g., in ampoules or in multi-dose containers. Certain pharmaceutical compositions for injection are suspensions, solutions or emulsions in oily or aqueous vehicles, and may contain formulatory agents such as suspending, stabilizing and/or dispersing agents. Certain solvents suitable for use in pharmaceutical compositions for injection include, but are not limited to, lipophilic solvents and fatty oils, such as sesame oil, synthetic fatty acid esters, such as ethyl oleate or triglycerides, and liposomes.

[0240] Under certain conditions, certain compounds disclosed herein act as acids. Although such compounds may be drawn or described in protonated (free acid) form, or ionized and in association with a cation (salt) form, aqueous solutions of such compounds exist in equilibrium among such forms. For example, a phosphate linkage of an oligonucleotide in aqueous solution exists in equilibrium among free acid, anion and salt forms. Unless otherwise indicated, compounds described herein are intended to include all such forms. Moreover, certain oligonucleotides have several such linkages, each of which is in equilibrium. Thus, oligonucleotides in solution exist in an ensemble of forms at multiple positions all at equilibrium. The term “oligonucleotide” is intended to include all such forms. Drawn structures necessarily depict a single form. Nevertheless, unless otherwise indicated, such drawings are likewise intended to include corresponding forms. Herein, a structure depicting the free acid of a compound followed by the term “or a salt thereof” expressly includes all such forms that may be fully or partially protonated/de-protonated/in association with a cation. In certain instances, one or more specific cation is identified.

[0241] In certain embodiments, modified oligonucleotides or oligomeric compounds are in aqueous solution with sodium. In certain embodiments, modified oligonucleotides or oligomeric compounds are in aqueous solution with potassium. In certain embodiments, modified oligonucleotides or oligomeric compounds are in PBS. In certain embodiments, modified oligonucleotides or oligomeric compounds are in water. In certain such embodiments, the pH of the solution is adjusted with NaOH and/or HCl to achieve a desired pH.

[0242] Herein, certain specific doses are described. A dose may be in the form of a dosage unit. For clarity, a dose (or dosage unit) of a modified oligonucleotide or an oligomeric compound in milligrams indicates the mass of the free acid form of the modified oligonucleotide or oligomeric compound. As described above, in aqueous solution, the free acid is in equilibrium with anionic and salt forms. However, for the purpose of calculating dose, it is assumed that the modified oligonucleotide or oligomeric compound exists as a solvent-free, sodium-acetate free, anhydrous, free acid. For example, where a modified oligonucleotide or an oligomeric compound is in solution comprising sodium (e.g., saline), the modified oligonucleotide or oligomeric compound may be partially or fully de-protonated and in association with Na+ ions. However, the mass of the protons is nevertheless counted toward the weight of the dose, and the mass of the Na+ ions are not counted toward the weight of the dose. Thus, for example, a dose, or dosage unit, of 80 mg of Compound No. 221967 equals the number of fully protonated molecules that weighs 80 mg. This would be equivalent to 84.64 mg of solvent-free, sodium-acetate free, anhydrous sodiated Compound No. 221967. When an oligomeric compound comprises a conjugate group, the mass of the conjugate group is included in calculating the dose of such oligomeric compound. If the conjugate group also has an acid, the conjugate group is likewise assumed to be fully protonated for the purpose of calculating dose.

### V. Certain Hotspot Regions

[0243] In certain embodiments, nucleobases in the ranges specified below comprise a hotspot region of MSH3 nucleic acid. In certain embodiments, modified oligonucleotides that are complementary to a hotspot region of a MSH3 nucleic acid achieve an average of more than 73% reduction of MSH3 RNA in vitro in a standard cell assay.

### 1. Nucleobases 4,438-4,475 of SEQ ID NO: 2

[0244] In certain embodiments, nucleobases 4,438-4,475 of SEQ ID NO: 2 comprise a hotspot region. In certain embodiments, modified oligonucleotides are complementary to a portion of nucleobases 4,438-4,475 of SEQ ID NO: 2. In certain embodiments, modified oligonucleotides are 20 nucleobases in length. In certain embodiments, modified oligonucleotides are 16 nucleobases in length. In certain embodiments, modified oligonucleotides are gapmers. In certain embodiments, the gapmers are MOE gapmers. In certain embodiments, the gapmers are cEt gapmers. In certain embodiments, the internucleoside linkages of the modified oligonucleotides are phosphorothioate internucleoside linkages and phosphodiester internucleoside linkages. In certain embodiments, each internucleoside linkage is a phosphorothioate internucleoside linkage.

[0245] The nucleobase sequences of SEQ ID NOs: 19, 203, 422, 478, 583, 603, 706, 1992, 2074, and 2143 are complementary to nucleobases 4,438-4,475 of SEQ ID NO: 2.

[0246] The nucleobase sequences of Compound Nos: 221976, 1161134, 1479858, 1480295, 1480396, 1480420, 1480609, 1480880, 1481004, 1481232, and 1481601 are complementary to nucleobases 4,438-4,475 of SEQ ID NO: 2.

[0247] In certain embodiments, modified oligonucleotides complementary to nucleobases 4,438-4,475 of SEQ ID NO: 2 achieve an average of 77% reduction of MSH3 RNA in vitro in the standard cell assay.

### 2. Nucleobases 13,141-13,213 of SEQ ID NO: 2

[0248] In certain embodiments, nucleobases 13,141-13,213 of SEQ ID NO: 2 comprise a hotspot region. In certain embodiments, modified oligonucleotides are complementary to a portion of nucleobases 13,141-13,213 of SEQ ID NO: 2. In certain embodiments, modified oligonucleotides are 20 nucleobases in length. In certain embodiments, modified oligonucleotides are 16 nucleobases in length. In certain embodiments, modified oligonucleotides are gapmers. In certain embodiments, the gapmers are MOE gapmers. In certain embodiments, the gapmers are cEt gapmers. In certain embodiments, the internucleoside linkages of the modified oligonucleotides are phosphorothioate internucleoside linkages and phosphodiester internucleoside linkages. In certain embodiments, each internucleoside linkage is a phosphorothioate internucleoside linkage.

[0249] The nucleobase sequences of SEQ ID NOs: 28, 280, 369, 487, 553, 1102, 1168, 1244, 1300, 1416, 1444, 1522, 1645, 1688, 1753, 1887, 1961, 2018, 2120, 3399, and 3430 are complementary to nucleobases 13,141-13,213 of SEQ ID NO: 2.

[0250] The nucleobase sequences of Compound Nos: 221986, 1161135, 1479803, 1480030, 1480032, 1480059, 1480166, 1480255, 1480390, 1480483, 1480809, 1480912, 1480932, 1481058, 1481073, 1481189, 1481335, 1481341, 1481428, 1481579, 1566494, and 1568354 are complementary to nucleobases 13,141-13,213 of SEQ ID NO: 2.

[0251] In certain embodiments, modified oligonucleotides complementary to nucleobases 13,141-13,213 of SEQ ID NO: 2 achieve an average of 76% reduction of MSH3 RNA in vitro in the standard cell assay.

### 3. Nucleobases 18,114-18,146 of SEQ ID NO: 2

[0252] In certain embodiments, nucleobases 18,114-18,146 of SEQ ID NO: 2 comprise a hotspot region. In certain embodiments, modified oligonucleotides are complementary to a portion of nucleobases 18,114-18,146 of SEQ ID NO: 2. In certain embodiments, modified oligonucleotides are 20 nucleobases in length. In certain embodiments, modified oligonucleotides are 16 nucleobases in length. In certain embodiments, modified oligonucleotides are gapmers. In certain embodiments, the gapmers are MOE gapmers. In certain embodiments, the gapmers are cEt gapmers. In certain embodiments, the internucleoside linkages of the modified oligonucleotides are phosphorothioate internucleoside linkages and phosphodiester internucleoside linkages. In certain embodiments, each internucleoside linkage is a phosphorothioate internucleoside linkage.

[0253] The nucleobase sequences of SEQ ID NOs: 129, 206, 450, 577, 611, 688, 801, 820, 900, and 3124 are complementary to nucleobases 18,114-18,146 of SEQ ID NO: 2.

[0254] The nucleobase sequences of Compound Nos: 1161146, 1161147, 1479947, 1480077, 1480142, 1480467, 1480489, 1481223, 1481402, and 1566584 are complementary to nucleobases 18,114-18,146 of SEQ ID NO: 2.

[0255] In certain embodiments, modified oligonucleotides complementary to nucleobases 18,114-18,146 of SEQ ID NO: 2 achieve an average of 89% reduction of MSH3 RNA in vitro in the standard cell assay.

### 4. Nucleobases 18,178-18,202 of SEQ ID NO: 2

[0256] In certain embodiments, nucleobases 18,178-18,202 of SEQ ID NO: 2 comprise a hotspot region. In certain embodiments, modified oligonucleotides are complementary to a portion of nucleobases 18,178-18,202 of SEQ ID NO: 2. In certain embodiments, modified oligonucleotides are 20 nucleobases in length. In certain embodiments, modified oligonucleotides are 16 nucleobases in length. In certain embodiments, modified oligonucleotides are gapmers. In certain embodiments, the gapmers are MOE gapmers. In certain embodiments, the gapmers are cEt gapmers. In certain embodiments, the internucleoside linkages of the modified oligonucleotides are phosphorothioate internucleoside linkages and phosphodiester internucleoside linkages. In certain embodiments, each internucleoside linkage is a phosphorothioate internucleoside linkage.

[0257] The nucleobase sequences of SEQ ID NOs: 53, 283, 381, 433, 1906, 2033, 2115, and 2156 are complementary to nucleobases 18,178-18,202 of SEQ ID NO: 2.

[0258] The nucleobase sequences of Compound Nos: 1161148, 1161149, 1480039, 1480288, 1480622, 1481506, 1481592, and 1481595 are complementary to nucleobases 18,178-18,202 of SEQ ID NO: 2.

[0259] In certain embodiments, modified oligonucleotides complementary to nucleobases 18,178-18,202 of SEQ ID NO: 2 achieve an average of 97% reduction of MSH3 RNA in vitro in the standard cell assay.

### 5. Nucleobases 18,245-18,290 of SEQ ID NO: 2

[0260] In certain embodiments, nucleobases 18,245-18,290 of SEQ ID NO: 2 comprise a hotspot region. In certain embodiments, modified oligonucleotides are complementary to a portion of nucleobases 18,245-18,290 of SEQ ID NO: 2. In certain embodiments, modified oligonucleotides are 20 nucleobases in length. In certain embodiments, modified oligonucleotides are 16 nucleobases in length. In certain embodiments, modified oligonucleotides are gapmers. In certain embodiments, the gapmers are MOE gapmers. In certain embodiments, the gapmers are cEt gapmers. In certain embodiments, the internucleoside linkages of the modified oligonucleotides are phosphorothioate internucleoside linkages and phosphodiester internucleoside linkages. In certain embodiments, each internucleoside linkage is a phosphorothioate internucleoside linkage.

[0261] The nucleobase sequences of SEQ ID NOs: 1159, 1272, 1290, 1374, 1472, 1550, and 1610 are complementary to nucleobases 18,245-18,290 of SEQ ID NO: 2.

[0262] The nucleobase sequences of Compound Nos: 1480218, 1480314, 1480434, 1480625, 1480752, 1480892, and 1481513 are complementary to nucleobases 18,245-18,290 of SEQ ID NO: 2.

[0263] In certain embodiments, modified oligonucleotides complementary to nucleobases 18,245-18,290 of SEQ ID NO: 2 achieve an average of 78% reduction of MSH3 RNA in vitro in the standard cell assay.

### 6. Nucleobases 20,249-20,330 of SEQ ID NO: 2

[0264] In certain embodiments, nucleobases 20,249-20,330 of SEQ ID NO: 2 comprise a hotspot region. In certain embodiments, modified oligonucleotides are complementary to a portion of nucleobases 20,249-20,330 of SEQ ID NO: 2. In certain embodiments, modified oligonucleotides are 20 nucleobases in length. In certain embodiments, modified oligonucleotides are 16 nucleobases in length. In certain embodiments, modified oligonucleotides are gapmers. In certain embodiments, the gapmers are MOE gapmers. In certain embodiments, the gapmers are cEt gapmers. In certain embodiments, the internucleoside linkages of the modified oligonucleotides are phosphorothioate internucleoside linkages and phosphodiester internucleoside linkages. In certain embodiments, each internucleoside linkage is a phosphorothioate internucleoside linkage.

[0265] The nucleobase sequences of SEQ ID NOs: 37, 54, 55, 56, 131, 132, 133, 208, 209, 210, 284, 285, 286, 287, 1176, 1266, 1301, 1385, 1457, 1533, 1594, 1715, 1799, and 2216 are complementary to nucleobases 20,249-20,330 of SEQ ID NO: 2.

[0266] The nucleobase sequences of Compound Nos: 222004, 1161152, 1161153, 1161154, 1161155, 1161156, 1161157, 1161158, 1161159, 1161160, 1161161, 1161162, 1161163, 1161164, 1479983, 1480366, 1480490, 1480494, 1480665, 1480944, 1481014, 1481408, 1481484, and 1567062 are complementary to nucleobases 20,249-20,330 of SEQ ID NO: 2.

[0267] In certain embodiments, modified oligonucleotides complementary to nucleobases 20,249-20,330 of SEQ ID NO: 2 achieve an average of 91% reduction of MSH3 RNA in vitro in the standard cell assay.

### 7. Nucleobases 23,001-23,061 of SEQ ID NO: 2

[0268] In certain embodiments, nucleobases 23,001-23,061 of SEQ ID NO: 2 comprise a hotspot region. In certain embodiments, modified oligonucleotides are complementary to a portion of nucleobases 23,001-23,061 of SEQ ID NO: 2. In certain embodiments, modified oligonucleotides are 20 nucleobases in length. In certain embodiments, modified oligonucleotides are 16 nucleobases in length. In certain embodiments, modified oligonucleotides are gapmers. In certain embodiments, the gapmers are MOE gapmers. In certain embodiments, the gapmers are cEt gapmers. In certain embodiments, the internucleoside linkages of the modified oligonucleotides are phosphorothioate internucleoside linkages and phosphodiester internucleoside linkages. In certain embodiments, each internucleoside linkage is a phosphorothioate internucleoside linkage.

[0269] The nucleobase sequences of SEQ ID NOs: 59, 212, 289, 361, 1145, 1242, 1284, 1423, 1495, 1513, 1638, 1731, 1740, 1823, 1935, 1999, 2054, 2148, 2748, 2817, 2920, and 3015 are complementary to nucleobases 23,001-23,061 of SEQ ID NO: 2.

[0270] The nucleobase sequences of Compound Nos: 1161171, 1161172, 1161173, 1479835, 1479906, 1480003, 1480011, 1480147, 1480204, 1480223, 1480470, 1480564, 1480696, 1480903, 1481139, 1481356, 1481430, 1481537, 1566675, 1566814, 1567535, and 1568299 are complementary to nucleobases 23,001-23,061 of SEQ ID NO: 2.

[0271] In certain embodiments, modified oligonucleotides complementary to nucleobases 23,001-23,061 of SEQ ID NO: 2 achieve an average of 90% reduction of MSH3 RNA in vitro in the standard cell assay.

### 8. Nucleobases 35,859-35,907 of SEQ ID NO: 2

[0272] In certain embodiments, nucleobases 35,859-35,907 of SEQ ID NO: 2 comprise a hotspot region. In certain embodiments, modified oligonucleotides are complementary to a portion of nucleobases 35,859-35,907 of SEQ ID NO: 2. In certain embodiments, modified oligonucleotides are 20 nucleobases in length. In certain embodiments, modified oligonucleotides are 16 nucleobases in length. In certain embodiments, modified oligonucleotides are gapmers. In certain embodiments, the gapmers are MOE gapmers. In certain embodiments, the gapmers are cEt gapmers. In certain embodiments, the internucleoside linkages of the modified oligonucleotides are phosphorothioate internucleoside linkages and phosphodiester internucleoside linkages. In certain embodiments, each internucleoside linkage is a phosphorothioate internucleoside linkage.

[0273] The nucleobase sequences of SEQ ID NOs: 1008, 1096, 2857, 2901, 2983, 3044, 3131, 3255, and 3292 are complementary to nucleobases 35,859-35,907 of SEQ ID NO: 2.

[0274] The nucleobase sequences of Compound Nos: 1480790, 1480925, 1566458, 1566738, 1566867, 1567040, 1567275, 1568161, and 1568374 are complementary to nucleobases 35,859-35,907 of SEQ ID NO: 2.

[0275] In certain embodiments, modified oligonucleotides complementary to nucleobases 35,859-35,907 of SEQ ID NO: 2 achieve an average of 92% reduction of MSH3 RNA in vitro in the standard cell assay.

### 9. Nucleobases 36,200-36,315 of SEQ ID NO: 2

[0276] In certain embodiments, nucleobases 36,200-36,315 of SEQ ID NO: 2 comprise a hotspot region. In certain embodiments, modified oligonucleotides are complementary to a portion of nucleobases 36,200-36,315 of SEQ ID NO: 2. In certain embodiments, modified oligonucleotides are 20 nucleobases in length. In certain embodiments, modified oligonucleotides are 16 nucleobases in length. In certain embodiments, modified oligonucleotides are gapmers. In certain embodiments, the gapmers are MOE gapmers. In certain embodiments, the gapmers are cEt gapmers. In certain embodiments, the internucleoside linkages of the modified oligonucleotides are phosphorothioate internucleoside linkages and phosphodiester internucleoside linkages. In certain embodiments, each internucleoside linkage is a phosphorothioate internucleoside linkage.

[0277] The nucleobase sequences of SEQ ID NOs: 1953, 2015, 2067, 2171, 2230, 2815, 2948, 3006, 3092, 3129, 3245, 3307, 3353, 3464, 3551, 3655, 3726, 3803, 3819, 3899, 4004, 4118, and 4181 are complementary to nucleobases 36,200-36,315 of SEQ ID NO: 2.

[0278] The nucleobase sequences of Compound Nos: 1480377, 1480948, 1480973, 1481256, 1566607, 1566616, 1566734, 1566802, 1566808, 1567607, 1567645, 1567887, 1567918, 1567922, 1567953, 1568024, 1568051, 1569039, 1569123, 1569584, 1569891, 1570345, and 1570729 are complementary to nucleobases 36,200-36,315 of SEQ ID NO: 2.

[0279] In certain embodiments, modified oligonucleotides complementary to nucleobases 36,200-36,315 of SEQ ID NO: 2 achieve an average of 85% reduction of MSH3 RNA in vitro in the standard cell assay.

### 10. Nucleobases 37,000-37,041 of SEQ ID NO: 2

[0280] In certain embodiments, nucleobases 37,000-37,041 of SEQ ID NO: 2 comprise a hotspot region. In certain embodiments, modified oligonucleotides are complementary to a portion of nucleobases 37,000-37,041 of SEQ ID NO: 2. In certain embodiments, modified oligonucleotides are 20 nucleobases in length. In certain embodiments, modified oligonucleotides are 16 nucleobases in length. In certain embodiments, modified oligonucleotides are gapmers. In certain embodiments, the gapmers are MOE gapmers. In certain embodiments, the gapmers are cEt gapmers. In certain embodiments, the internucleoside linkages of the modified oligonucleotides are phosphorothioate internucleoside linkages and phosphodiester internucleoside linkages. In certain embodiments, each internucleoside linkage is a phosphorothioate internucleoside linkage.

[0281] The nucleobase sequences of SEQ ID NOs: 1331, 1405, 3346, 3357, 3488, 3547, and 3634 are complementary to nucleobases 37,000-37,041 of SEQ ID NO: 2.

[0282] The nucleobase sequences of Compound Nos: 1481055, 1481156, 1566840, 1567834, 1568166, 1569247, and 1570571 are complementary to nucleobases 37,000-37,041 of SEQ ID NO: 2.

[0283] In certain embodiments, modified oligonucleotides complementary to nucleobases 37,000-37,041 of SEQ ID NO: 2 achieve an average of 88% reduction of MSH3 RNA in vitro in the standard cell assay.

### 11. Nucleobases 73,448-73,497 of SEQ ID NO: 2

[0284] In certain embodiments, nucleobases 73,448-73,497 of SEQ ID NO: 2 comprise a hotspot region. In certain embodiments, modified oligonucleotides are complementary to a portion of nucleobases 73,448-73,497 of SEQ ID NO: 2. In certain embodiments, modified oligonucleotides are 20 nucleobases in length. In certain embodiments, modified oligonucleotides are 16 nucleobases in length. In certain embodiments, modified oligonucleotides are gapmers. In certain embodiments, the gapmers are MOE gapmers. In certain embodiments, the gapmers are cEt gapmers. In certain embodiments, the internucleoside linkages of the modified oligonucleotides are phosphorothioate internucleoside linkages and phosphodiester internucleoside linkages. In certain embodiments, each internucleoside linkage is a phosphorothioate internucleoside linkage.

[0285] The nucleobase sequences of SEQ ID NOs: 62, 139, 215, 216, 292, 356, 506, 560, 650, 673, 774, 831, 918, 1040, 1105, 1197, 1256, 1282, 1428, 1469, 1570, 1657, 2141, and 3979 are complementary to nucleobases 73,448-73,497 of SEQ ID NO: 2.

[0286] The nucleobase sequences of Compound Nos: 1161183, 1161184, 1161185, 1161186, 1161187, 1479807, 1480007, 1480060, 1480233, 1480402, 1480502, 1480688, 1480816, 1481115, 1481122, 1481144, 1481153, 1481433, 1481516, 1481529, 1481564, 1481585, 1481603, and 1566904 are complementary to nucleobases 73,448-73,497 of SEQ ID NO: 2.

[0287] In certain embodiments, modified oligonucleotides complementary to nucleobases 73,448-73,497 of SEQ ID NO: 2 achieve an average of 74% reduction of MSH3 RNA in vitro in the standard cell assay.

### 12. Nucleobases 76,851-76,900 of SEQ ID NO: 2

[0288] In certain embodiments, nucleobases 76,851-76,900 of SEQ ID NO: 2 comprise a hotspot region. In certain embodiments, modified oligonucleotides are complementary to a portion of nucleobases 76,851-76,900 of SEQ ID NO: 2. In certain embodiments, modified oligonucleotides are 20 nucleobases in length. In certain embodiments, modified oligonucleotides are 16 nucleobases in length. In certain embodiments, modified oligonucleotides are gapmers. In certain embodiments, the gapmers are MOE gapmers. In certain embodiments, the gapmers are cEt gapmers. In certain embodiments, the internucleoside linkages of the modified oligonucleotides are phosphorothioate internucleoside linkages and phosphodiester internucleoside linkages. In certain embodiments, each internucleoside linkage is a phosphorothioate internucleoside linkage.

[0289] The nucleobase sequences of SEQ ID NOs: 63, 1076, 1148, 1260, 1312, 1386, 1440, 1541, 1634, 1674, 1797, 1834, and 1898 are complementary to nucleobases 76,851-76,900 of SEQ ID NO: 2.

[0290] The nucleobase sequences of Compound Nos: 1161189, 1479897, 1479934, 1480148, 1480263, 1480331, 1480520, 1480562, 1480664, 1480666, 1481027, 1481226, and 1481471 are complementary to nucleobases 76,851-76,900 of SEQ ID NO: 2.

[0291] In certain embodiments, modified oligonucleotides complementary to nucleobases 76,851-76,900 of SEQ ID NO: 2 achieve an average of 82% reduction of MSH3 RNA in vitro in the standard cell assay.

### 13. Nucleobases 89,462-89,531 of SEQ ID NO: 2

[0292] In certain embodiments, nucleobases 89,462-89,531 of SEQ ID NO: 2 comprise a hotspot region. In certain embodiments, modified oligonucleotides are complementary to a portion of nucleobases 89,462-89,531 of SEQ ID NO: 2. In certain embodiments, modified oligonucleotides are 20 nucleobases in length. In certain embodiments, modified oligonucleotides are 16 nucleobases in length. In certain embodiments, modified oligonucleotides are gapmers. In certain embodiments, the gapmers are MOE gapmers. In certain embodiments, the gapmers are cEt gapmers. In certain embodiments, the internucleoside linkages of the modified oligonucleotides are phosphorothioate internucleoside linkages and phosphodiester internucleoside linkages. In certain embodiments, each internucleoside linkage is a phosphorothioate internucleoside linkage.

[0293] The nucleobase sequences of SEQ ID NOs: 217, 294, 429, 481, 562, 636, 738, 761, 878, 940, 2059, 2167, 2487, and 2507 are complementary to nucleobases 89,462-89,531 of SEQ ID NO: 2.

[0294] The nucleobase sequences of Compound Nos: 1161191, 1161192, 1480231, 1480305, 1480808, 1480942, 1481006, 1481069, 1481161, 1481207, 1481536, 1481558, 1566481, and 1568431 are complementary to nucleobases 89,462-89,531 of SEQ ID NO: 2.

[0295] In certain embodiments, modified oligonucleotides complementary to nucleobases 89,462-89,531 of SEQ ID NO: 2 achieve an average of 80% reduction of MSH3 RNA in vitro in the standard cell assay.

### 14. Nucleobases 92,554-92,591 of SEQ ID NO: 2

[0296] In certain embodiments, nucleobases 92,554-92,591 of SEQ ID NO: 2 comprise a hotspot region. In certain embodiments, modified oligonucleotides are complementary to a portion of nucleobases 92,554-92,591 of SEQ ID NO: 2. In certain embodiments, modified oligonucleotides are 20 nucleobases in length. In certain embodiments, modified oligonucleotides are 16 nucleobases in length. In certain embodiments, modified oligonucleotides are gapmers. In certain embodiments, the gapmers are MOE gapmers. In certain embodiments, the gapmers are cEt gapmers. In certain embodiments, the internucleoside linkages of the modified oligonucleotides are phosphorothioate internucleoside linkages and phosphodiester internucleoside linkages. In certain embodiments, each internucleoside linkage is a phosphorothioate internucleoside linkage.

[0297] The nucleobase sequences of SEQ ID NOs: 65, 218, 295, 526, 619, 694, 766, 862, 945, 978, 1084, 1172, 1276, 1321, and 1395 are complementary to nucleobases 92,554-92,591 of SEQ ID NO: 2.

[0298] The nucleobase sequences of Compound Nos: 1161195, 1161196, 1161197, 1480048, 1480196, 1480422, 1480587, 1480707, 1480770, 1480897, 1480928, 1480956, 1480970, 1481082, and 1481560 are complementary to nucleobases 92,554-92,591 of SEQ ID NO: 2.

[0299] In certain embodiments, modified oligonucleotides complementary to nucleobases 92,554-92,591 of SEQ ID NO: 2 achieve an average of 78% reduction of MSH3 RNA in vitro in the standard cell assay.

### 15. Nucleobases 109,563-109,628 of SEQ ID NO: 2

[0300] In certain embodiments, nucleobases 109,563-109,628 of SEQ ID NO: 2 comprise a hotspot region. In certain embodiments, modified oligonucleotides are complementary to a portion of nucleobases 109,563-109,628 of SEQ ID NO: 2. In certain embodiments, modified oligonucleotides are 20 nucleobases in length. In certain embodiments, modified oligonucleotides are 16 nucleobases in length. In certain embodiments, modified oligonucleotides are gapmers. In certain embodiments, the gapmers are MOE gapmers. In certain embodiments, the gapmers are cEt gapmers. In certain embodiments, the internucleoside linkages of the modified oligonucleotides are phosphorothioate internucleoside linkages and phosphodiester internucleoside linkages. In certain embodiments, each internucleoside linkage is a phosphorothioate internucleoside linkage.

[0301] The nucleobase sequences of SEQ ID NOs: 66, 296, 377, 627, 701, 760, 815, 919, 1028, 1095, 1151, 1243, 1323, 1354, 1496, 1575, 1646, 1666, 1789, 1828, 1907, 1969, 2093, 2192, and 2611 are complementary to nucleobases 109,563-109,628 of SEQ ID NO: 2.

[0302] The nucleobase sequences of Compound Nos: 1161200, 1161201, 1479802, 1479825, 1479843, 1479878, 1480050, 1480164, 1480182, 1480220, 1480389, 1480513, 1480747, 1480886, 1480911, 1480923, 1480957, 1481017, 1481269, 1481274, 1481306, 1481385, 1481442, 1481582, and 1567156 are complementary to nucleobases 109,563-109,628 of SEQ ID NO: 2.

[0303] In certain embodiments, modified oligonucleotides complementary to nucleobases 109,563-109,628 of SEQ ID NO: 2 achieve an average of 79% reduction of MSH3 RNA in vitro in the standard cell assay.

### 16. Nucleobases 116,894-116,937 of SEQ ID NO: 2

[0304] In certain embodiments, nucleobases 116,894-116,937 of SEQ ID NO: 2 comprise a hotspot region. In certain embodiments, modified oligonucleotides are complementary to a portion of nucleobases 116,894-116,937 of SEQ ID NO: 2. In certain embodiments, modified oligonucleotides are 20 nucleobases in length. In certain embodiments, modified oligonucleotides are 16 nucleobases in length. In certain embodiments, modified oligonucleotides are gapmers. In certain embodiments, the gapmers are MOE gapmers. In certain embodiments, the gapmers are cEt gapmers. In certain embodiments, the internucleoside linkages of the modified oligonucleotides are phosphorothioate internucleoside linkages and phosphodiester internucleoside linkages. In certain embodiments, each internucleoside linkage is a phosphorothioate internucleoside linkage.

[0305] The nucleobase sequences of SEQ ID NOs: 69, 222, 299, 412, 1621, 1687, 1792, 1819, 1932, 2006, 2094, and 2135 are complementary to nucleobases 116,894-116,937 of SEQ ID NO: 2.

[0306] The nucleobase sequences of Compound Nos: 1161211, 1161212, 1161213, 1479931, 1480286, 1480385, 1480458, 1480628, 1480775, 1480960, 1480982, and 1481340 are complementary to nucleobases 116,894-116,937 of SEQ ID NO: 2.

[0307] In certain embodiments, modified oligonucleotides complementary to nucleobases 116,894-116,937 of SEQ ID NO: 2 achieve an average of 77% reduction of MSH3 RNA in vitro in the standard cell assay.

### 17. Nucleobases 116,894-116,951 of SEQ ID NO: 2

[0308] In certain embodiments, nucleobases 116,894-116,951 of SEQ ID NO: 2 comprise a hotspot region. In certain embodiments, modified oligonucleotides are complementary to a portion of nucleobases 116,894-116,951 of SEQ ID NO: 2. In certain embodiments, modified oligonucleotides are 20 nucleobases in length. In certain embodiments, modified oligonucleotides are 16 nucleobases in length. In certain embodiments, modified oligonucleotides are gapmers. In certain embodiments, the gapmers are MOE gapmers. In certain embodiments, the gapmers are cEt gapmers. In certain embodiments, the internucleoside linkages of the modified oligonucleotides are phosphorothioate internucleoside linkages and phosphodiester internucleoside linkages. In certain embodiments, each internucleoside linkage is a phosphorothioate internucleoside linkage.

[0309] The nucleobase sequences of SEQ ID NOs: 69, 222, 299, 412, 1361, 1448, 1563, 1621, 1687, 1792, 1819, 1932, 2006, 2094, and 2135 are complementary to nucleobases 116,894-116,951 of SEQ ID NO: 2.

[0310] The nucleobase sequences of Compound Nos: 1161211, 1161212, 1161213, 1479917, 1479931, 1480115, 1480286, 1480385, 1480458, 1480628, 1480775, 1480960, 1480982, 1481008, and 1481340 are complementary to nucleobases 116,894-116,951 of SEQ ID NO: 2.

[0311] In certain embodiments, modified oligonucleotides complementary to nucleobases 116,894-116,951 of SEQ ID NO: 2 achieve an average of 78% reduction of MSH3 RNA in vitro in the standard cell assay.

### 18. Nucleobases 118,292-118,317 of SEQ ID NO: 2

[0312] In certain embodiments, nucleobases 118,292-118,317 of SEQ ID NO: 2 comprise a hotspot region. In certain embodiments, modified oligonucleotides are complementary to a portion of nucleobases 118,292-118,317 of SEQ ID NO: 2. In certain embodiments, modified oligonucleotides are 20 nucleobases in length. In certain embodiments, modified oligonucleotides are 16 nucleobases in length. In certain embodiments, modified oligonucleotides are gapmers. In certain embodiments, the gapmers are MOE gapmers. In certain embodiments, the gapmers are cEt gapmers. In certain embodiments, the internucleoside linkages of the modified oligonucleotides are phosphorothioate internucleoside linkages and phosphodiester internucleoside linkages. In certain embodiments, each internucleoside linkage is a phosphorothioate internucleoside linkage.

[0313] The nucleobase sequences of SEQ ID NOs: 744, 837, 943, 971, 1068, and 2690 are complementary to nucleobases 118,292-118,317 of SEQ ID NO: 2.

[0314] The nucleobase sequences of Compound Nos: 1479889, 1479891, 1480330, 1480367, 1481050, and 1567540 are complementary to nucleobases 118,292-118,317 of SEQ ID NO: 2.

[0315] In certain embodiments, modified oligonucleotides complementary to nucleobases 118,292-118,317 of SEQ ID NO: 2 achieve an average of 89% reduction of MSH3 RNA in vitro in the standard cell assay.

### 19. Nucleobases 122,127-122,161 of SEQ ID NO: 2

[0316] In certain embodiments, nucleobases 122,127-122,161 of SEQ ID NO: 2 comprise a hotspot region. In certain embodiments, modified oligonucleotides are complementary to a portion of nucleobases 122,127-122,161 of SEQ ID NO: 2. In certain embodiments, modified oligonucleotides are 20 nucleobases in length. In certain embodiments, modified oligonucleotides are 16 nucleobases in length. In certain embodiments, modified oligonucleotides are gapmers. In certain embodiments, the gapmers are MOE gapmers. In certain embodiments, the gapmers are cEt gapmers. In certain embodiments, the internucleoside linkages of the modified oligonucleotides are phosphorothioate internucleoside linkages and phosphodiester internucleoside linkages. In certain embodiments, each internucleoside linkage is a phosphorothioate internucleoside linkage.

[0317] The nucleobase sequences of SEQ ID NOs: 699, 764, 850, 906, 1017, 1050, 2784, and 2832 are complementary to nucleobases 122,127-122,161 of SEQ ID NO: 2.

[0318] The nucleobase sequences of Compound Nos: 1479970, 1480224, 1480294, 1480691, 1480706, 1480984, 1567437, and 1568371 are complementary to nucleobases 122,127-122,161 of SEQ ID NO: 2.

[0319] In certain embodiments, modified oligonucleotides complementary to nucleobases 122,127-122,161 of SEQ ID NO: 2 achieve an average of 82% reduction of MSH3 RNA in vitro in the standard cell assay.

### 20. Nucleobases 180,800-180,823 of SEQ ID NO: 2

[0320] In certain embodiments, nucleobases 180,800-180,823 of SEQ ID NO: 2 comprise a hotspot region. In certain embodiments, modified oligonucleotides are complementary to a portion of nucleobases 180,800-180,823 of SEQ ID NO: 2. In certain embodiments, modified oligonucleotides are 20 nucleobases in length. In certain embodiments, modified oligonucleotides are 16 nucleobases in length. In certain embodiments, modified oligonucleotides are gapmers. In certain embodiments, the gapmers are MOE gapmers. In certain embodiments, the gapmers are cEt gapmers. In certain embodiments, the internucleoside linkages of the modified oligonucleotides are phosphorothioate internucleoside linkages and phosphodiester internucleoside linkages. In certain embodiments, each internucleoside linkage is a phosphorothioate internucleoside linkage.

[0321] The nucleobase sequences of SEQ ID NOs: 119, 120, 196, 197, 273, and 350 are complementary to nucleobases 180,800-180,823 of SEQ ID NO: 2.

[0322] The nucleobase sequences of Compound Nos: 1161413, 1161414, 1161415, 1161416, 1161417, and 1161418 are complementary to nucleobases 180,800-180,823 of SEQ ID NO: 2.

[0323] In certain embodiments, modified oligonucleotides complementary to nucleobases 180,800-180,823 of SEQ ID NO: 2 achieve an average of 80% reduction of MSH3 RNA in vitro in the standard cell assay.

### 21. Nucleobases 224,684-224,713 of SEQ ID NO: 2

[0324] In certain embodiments, nucleobases 224,684-224,713 of SEQ ID NO: 2 comprise a hotspot region. In certain embodiments, modified oligonucleotides are complementary to a portion of nucleobases 224,684-224,713 of SEQ ID NO: 2. In certain embodiments, modified oligonucleotides are 20 nucleobases in length. In certain embodiments, modified oligonucleotides are 16 nucleobases in length. In certain embodiments, modified oligonucleotides are gapmers. In certain embodiments, the gapmers are MOE gapmers. In certain embodiments, the gapmers are cEt gapmers. In certain embodiments, the internucleoside linkages of the modified oligonucleotides are phosphorothioate internucleoside linkages and phosphodiester internucleoside linkages. In certain embodiments, each internucleoside linkage is a phosphorothioate internucleoside linkage.

[0325] The nucleobase sequences of SEQ ID NOs: 399, 449, 1704, 1812, 1838, 1957, 1986, 2069, and 2175 are complementary to nucleobases 224,684-224,713 of SEQ ID NO: 2.

[0326] The nucleobase sequences of Compound Nos: 1480134, 1480258, 1480450, 1480479, 1480647, 1480782, 1481116, 1481365, and 1481626 are complementary to nucleobases 224,684-224,713 of SEQ ID NO: 2.

[0327] In certain embodiments, modified oligonucleotides complementary to nucleobases 224,684-224,713 of SEQ ID NO: 2 achieve an average of 77% reduction of MSH3 RNA in vitro in the standard cell assay.

### Nonlimiting Disclosure and Incorporation by Reference

[0328] Each of the literature and patent publications listed herein is incorporated by reference in its entirety.

[0329] While certain compounds, compositions and methods described herein have been described with specificity in accordance with certain embodiments, the following examples serve only to illustrate the compounds described herein and are not intended to limit the same. Each of the references, GenBank accession numbers, and the like recited in the present application is incorporated herein by reference in its entirety.

[0330] Although the sequence listing accompanying this filing identifies each sequence as either “RNA” or “DNA” as required, in reality, those sequences may be modified with any combination of chemical modifications. One of skill in the art will readily appreciate that such designation as “RNA” or “DNA” to describe modified oligonucleotides is, in certain instances, arbitrary. For example, an oligonucleotide comprising a nucleoside comprising a 2′-OH sugar moiety and a thymine base could be described as a DNA having a modified sugar (2′-OH in place of one 2′-H of DNA) or as an RNA having a modified base (thymine (methylated uracil) in place of a uracil of RNA). Accordingly, nucleic acid sequences provided herein, including, but not limited to those in the sequence listing, are intended to encompass nucleic acids containing any combination of natural or modified RNA and/or DNA, including, but not limited to such nucleic acids having modified nucleobases. By way of further example and without limitation, an oligomeric compound having the nucleobase sequence “ATCGATCG” encompasses any oligomeric compounds having such nucleobase sequence, whether modified or unmodified, including, but not limited to, such compounds comprising RNA bases, such as those having sequence “AUCGAUCG” and those having some DNA bases and some RNA bases such as “AUCGATCG” and oligomeric compounds having other modified nucleobases, such as “ATmCGAUCG,” wherein mC indicates a cytosine base comprising a methyl group at the 5-position.

[0331] Certain compounds described herein (e.g., modified oligonucleotides) have one or more asymmetric center and thus give rise to enantiomers, diastereomers, and other stereoisomeric configurations that may be defined, in terms of absolute stereochemistry, as (R) or (S), as a or 13 such as for sugar anomers, or as (D) or (L), such as for amino acids, etc. Compounds provided herein that are drawn or described as having certain stereoisomeric configurations include only the indicated compounds. Compounds provided herein that are drawn or described with undefined stereochemistry include all such possible isomers, including their stereorandom and optically pure forms, unless specified otherwise. Likewise, tautomeric forms of the compounds herein are also included unless otherwise indicated. Unless otherwise indicated, compounds described herein are intended to include corresponding salt forms.

[0332] The compounds described herein include variations in which one or more atoms are replaced with a non-radioactive isotope or radioactive isotope of the indicated element. For example, compounds herein that comprise hydrogen atoms encompass all possible deuterium substitutions for each of the ¹H hydrogen atoms. Isotopic substitutions encompassed by the compounds herein include but are not limited to: ²H or ³H in place of ¹H, ¹³C or ¹⁴C in place of ¹²C, ¹⁵N in place of ¹⁴N, ¹⁷O or ¹⁸O in place of ¹⁶O, and ³³S, ³⁴S, ³⁵S, or ³⁶S in place of ³²S. In certain embodiments, non-radioactive isotopic substitutions may impart new properties on the oligomeric compound that are beneficial for use as a therapeutic or research tool. In certain embodiments, radioactive isotopic substitutions may make the compound suitable for research or diagnostic purposes such as imaging.

### EXAMPLES

[0333] The following examples illustrate certain embodiments of the present disclosure and are not limiting. Moreover, where specific embodiments are provided, the inventors have contemplated generic application of those specific embodiments. For example, disclosure of an oligonucleotide having a particular motif provides reasonable support for additional oligonucleotides having the same or similar motif. And, for example, where a particular high-affinity modification appears at a particular position, other high-affinity modifications at the same position are considered suitable, unless otherwise indicated.

### Example 1: Effects of 5-10-5 MOE Gapmer Modified Oligonucleotides on Human MSH3 In Vitro, Single Dose

[0334] Modified oligonucleotides complementary to an MSH3 nucleic acid were synthesized and tested for their effect on MSH3 RNA levels in vitro. The modified oligonucleotides were tested in a series of experiments using the same culture conditions.

[0335] The modified oligonucleotides in Tables 1 and 2 below are 5-10-5 MOE gapmers (i.e., they have a central gap segment of ten 2′-deoxynucleosides flanked on each side by wing segments, each wing segment consisting of five 2′-MOE modified nucleosides). The internucleoside linkages throughout each modified oligonucleotide are phosphorothioate (P═S) linkages. All cytosine nucleobases throughout each modified oligonucleotide are 5-methylcytosines.

[0336] “Start site” indicates the 5′-most nucleoside of the target sequence to which the modified oligonucleotide is complementary. “Stop site” indicates the 3′-most nucleoside of the target sequence to which the modified oligonucleotide is complementary. As shown in the tables below, the modified oligonucleotides are complementary to either the human MSH3 mRNA, designated herein as SEQ ID NO: 1 (GENBANK Accession No. NM_002439.4) or to the human MSH3 genomic sequence, designated herein as SEQ ID NO: 2 (GENBANK Accession No. NC_000005.10 truncated from nucleotides 80652001 to 80880000) or to both. In some cases, the modified oligonucleotide is complementary to the human MSH3 mRNA, designated herein as SEQ ID NO:3 (GENBANK Accession No. NM_002439.1). ‘N/A’ indicates that the modified oligonucleotide is not complementary to that particular target sequence with 100% complementarity.

[0337] Cultured A549 cells were transfected using Lipofectin with 100 nM of modified oligonucleotide. After a treatment period of approximately 24 hours, RNA was isolated from the cells and MSH3 RNA levels were measured by quantitative real-time RTPCR. Human primer probe set HTS7138 (forward sequence AGCTAGAAACCCGGATGTCAAG, designated herein as SEQ ID NO: 4; reverse sequence GATGAGCGCCTCTGTTTGCT, designated herein as SEQ ID NO: 5; probe sequence TGCTGCTTCCTTCGGCCTTGTCC, designated herein as SEQ ID NO: 6) was used to measure RNA levels. MSH3 RNA levels were normalized to total RNA content, as measured by RIBOGREEN®. Results are presented as percent of MSH3 RNA, relative to untreated control cells (% UTC). The values marked by the symbol “†” indicate that the modified oligonucleotide is complementary to the amplicon region of the primer probe set. Additional assays may be used to measure the potency and efficacy of the modified oligonucleotides complementary to the amplicon region.

TABLE 1
Reduction of MSH3 RNA by 5-10-5 MOE gapmers
with phosphorothioate linkages in A549 cells

| | SEQ | SEQ | SEQ | SEQ | | | |
|---|---|---|---|---|---|---|---|
| | ID | ID | ID | ID | | | |
| | NO: 1 | NO: 1 | NO: 2 | NO: 2 | | MSH3 | SEQ |
| Compound | Start | Stop | Start | Stop | | (% | ID |
| Number | Site | Site | Site | Site | Sequence (5′ to 3′) | UTC) | No. |
| 221967 | 3484 | 3503 | 223852 | 223871 | GTCTTCATTTTAATGAAGAA | 76 | 10 |
| 221968 | 2861 | 2880 | 161709 | 161728 | CATCCACAATCCCAATTGTC | 65 | 11 |
| 221969 | 2120 | 2139 | 116076 | 116095 | TTAAGTAATGCTCCACTGGA | 60 | 12 |
| 221970 | 507 | 526 | 13211 | 13230 | CTTTGAGGAAGGGCAGAATC | 72 | 13 |
| 221971 | 4430 | 4449 | N/A | N/A | TTTATAGCAAGTATTCATTA | 99 | 14 |
| 221972 | 2888 | 2907 | N/A | N/A | CTGCAGCACCCATCCTTGTG | 34 | 15 |
| 221973 | 2085 | 2104 | 116041 | 116060 | ATTTCTAAAATAACGGTCCG | 75 | 16 |
| 221974 | 1337 | 1356 | 27010 | 27029 | GCTCTACTGGCTGCAGGCTT | 27^{†} | 17 |
| 221975 | 1494 | 1513 | 73526 | 73545 | TTTGCATAAAACTCTGTAAC | 72 | 18 |
| 221976 | 363 | 382 | 4456 | 4475 | ACTTTCTTTTTAACAGGCCC | 26 | 19 |
| 221977 | 1412 | 1431 | N/A | N/A | CATCCTGCACACTAACAGAT | 47 | 20 |
| 221978 | 2491 | 2510 | 126812 | 126831 | AAAATCAAGCCATTCAGCAC | 59 | 21 |
| 221979 | 3894 | 3913 | 224262 | 224281 | GATAAACTGGTTGCATAATA | 52 | 22 |
| 221980 | 1069 | 1088 | 20820 | 20839 | TTTTGTATAAAGGGCAGTCA | 51 | 23 |
| 221981 | 2867 | 2886 | 161715 | 161734 | AAATGCCATCCACAATCCCA | 68 | 24 |
| 221982 | 2937 | 2956 | 202173 | 202192 | GTGTCAGTCAGTTCTTCCAT | 52 | 25 |
| 221983 | 2105 | 2124 | 116061 | 116080 | CTGGACTGAGGAGTTCAGGA | 46 | 26 |
| 221984 | 1638 | 1657 | N/A | N/A | TTAAAATTCTCAGGTTTGGA | 50 | 27 |
| 221986 | 444 | 463 | 13148 | 13167 | CTGGTCCTCAGACATTTCTT | 27 | 28 |
| 221988 | 3722 | 3741 | 224090 | 224109 | CTGTCCATAAAATTTTCTAA | 82 | 29 |
| 221990 | 3463 | 3482 | 223831 | 223850 | AGAAGTCTGTGTTTCTTCCA | 55 | 30 |
| 221992 | 1452 | 1471 | 73484 | 73503 | TCAAAATAAATGTTATCCAT | 84 | 31 |
| 221994 | 1579 | 1598 | 76896 | 76915 | GATGGCAGCCAAAGAGCAAA | 40 | 32 |
| 221996 | 3864 | 3883 | 224232 | 224251 | AGTTCAATGGATAGATTCCT | 51 | 33 |
| 221998 | 4345 | 4364 | 224713 | 224732 | TGACAATATTTAACCTTTTA | 80 | 34 |
| 222000 | 2600 | 2619 | 135649 | 135668 | AGTAATCTCCTTGCTTAGCG | 54 | 35 |
| 222002 | 997 | 1016 | 20748 | 20767 | AGTTTCAGTTTGCTTCACAA | 43 | 36 |
| 222004 | 898 | 917 | 20269 | 20288 | GTTGTGATCTAAATGGCAAT | 40 | 37 |
| 222006 | 2826 | 2845 | 161674 | 161693 | ACATAGGAGCCAATCTGAGC | 72 | 38 |
| 222008 | 2031 | 2050 | 115987 | 116006 | GGTATTATTGCTTGAAATTC | 55 | 39 |
| 222010 | 1941 | 1960 | 109643 | 109662 | CTACAGAGTCCCCTCTCTAT | 63 | 40 |
| 222012 | 2524 | 2543 | 135573 | 135592 | CAAGGAGTGATAATGTTCAC | 48 | 41 |
| 222014 | 536 | 555 | 13240 | 13259 | TCTCCTGCAGAGATTCTGTC | 30 | 42 |
| 222016 | 3863 | 3882 | 224231 | 224250 | GTTCAATGGATAGATTCCTG | 38 | 43 |
| 222018 | 2469 | 2488 | 126790 | 126809 | CAGTCAAGGACTAGCTGCTC | 48 | 44 |
| 222020 | 1725 | 1744 | N/A | N/A | TTCATATCAGTCTGATTCTG | 51 | 45 |

TABLE 2
Reduction of MSH3 RNA by 5-10-5 MOE gapmers
with phosphorothioate linkages in A549 cells

| | SEQ ID | SEQ ID | | | |
|---|---|---|---|---|---|
| | NO: 3 | NO: 3 | | MSH3 | SEQ |
| Compound | Start | Stop | | (% | ID |
| Number | Site | Site | Sequence (5′ to 3′) | UTC) | No. |
| 221966 | 8 | 27 | CGGCGAGACATGGCAGGGCT | 23 | 46 |

### Example 2: Effects of 3-10-3 cEt Gapmer Modified Oligonucleotides on Human MSH3 RNA In Vitro, Single Dose

[0338] Modified oligonucleotides complementary to an MSH3 nucleic acid were synthesized and tested for their effect on MSH3 RNA levels in vitro. The modified oligonucleotides were tested in a series of experiments using the same culture conditions.

[0339] The modified oligonucleotides were designed as indicated in Tables 3-6 below. The modified oligonucleotides are all 3-10-3 cEt gapmers (i.e., they have a central gap segment of ten 2′-deoxynucleosides flanked on each side by wing segments, each wing segment consisting of three cEt modified nucleosides). The internucleoside linkages throughout each modified oligonucleotide are phosphorothioate (P═S) linkages. All cytosine nucleobases throughout each modified oligonucleotide are 5-methylcytosines.

[0340] “Start site” indicates the 5′-most nucleoside of the target sequence to which the modified oligonucleotide is complementary. “Stop site” indicates the 3′-most nucleoside of the target sequence to which the modified oligonucleotide is complementary. As shown in the tables below, the modified oligonucleotides are complementary to either the human MSH3 mRNA, designated herein as SEQ ID NO: 1 (described herein above) or to the human MSH3 genomic sequence, designated herein as SEQ ID NO: 2 (described herein above) or to both. ‘N/A’ indicates that the modified oligonucleotide is not complementary to that particular target sequence with 100% complementarity.

[0341] Cultured A431 cells at a density 10,000 cells per well were treated by free uptake with 2000 nM of modified oligonucleotide. After a treatment period of approximately 48 hours, RNA was isolated from the cells and MSH3 RNA levels were measured by quantitative real-time RTPCR. Human primer probe set RTS40982 (forward sequence TTTTATTGGCATTGTGGGAGTG, designated herein as SEQ ID NO: 7; reverse sequence TTGACATCCGGGTTTCTAGC, designated herein as SEQ ID NO: 8; probe sequence AGGCGAGGTTGTGTTTGATAGTTTCCA, designated herein as SEQ ID NO: 9) was used to measure RNA levels. MSH3 RNA levels were normalized to total RNA content, as measured by RIBOGREEN®. Results are presented as percent of MSH3 RNA, relative to untreated control cells (% UTC). The values marked by the symbol “†” indicate that the modified oligonucleotide is complementary to the amplicon region of the primer probe set. Additional assays may be used to measure the potency and efficacy of the modified oligonucleotides complementary to the amplicon region.

TABLE 3
Reduction of MSH3 RNA by 3-10-3 cEt gapmers
with phosphorothioate linkages in A431 cells

| | SEQ | SEQ | SEQ | SEQ | | | |
|---|---|---|---|---|---|---|---|
| | ID | ID | ID | ID | | | |
| | NO: 1 | NO: 1 | NO: 2 | NO: 2 | | MSH3 | SEQ |
| Compound | Start | Stop | Start | Stop | Sequence | (% | ID |
| Number | Site | Site | Site | Site | (5′ to 3′) | UTC) | No. |
| 1161128 | 26 | 41 | 2673 | 2688 | AGGAGCGCGAGCCCGC | 71 | 47 |
| 1161132 | 153 | 168 | 2800 | 2815 | ACTGGAAGAATCGGCT | 13 | 48 |
| 1161136 | 494 | 509 | 13198 | 13213 | ATCGCAGCAGAATTCT | 21 | 49 |
| 1161140 | 521 | 536 | 13225 | 13240 | CTGGACTCTACTTTGA | 16 | 50 |
| 1161142 | 538 | 553 | 13242 | 13257 | TCCTGCAGAGATTCTG | 15 | 51 |
| 1161145 | 628 | 643 | 13332 | 13347 | CGTTTCGAATCTTCAG | 58 | 52 |
| 1161149 | 746 | 761 | 18183 | 18198 | GCTTTTGGACCGTTTG | 0 | 53 |
| 1161153 | 880 | 895 | 20251 | 20266 | ATATTGAGCTCTCGGG | 6 | 54 |
| 1161157 | 904 | 919 | 20275 | 20290 | AAGTTGTGATCTAAAT | 23 | 55 |
| 1161161 | 923 | 938 | 20294 | 20309 | AGGTATACTTGCTGTC | 2 | 56 |
| 1161165 | 1050 | 1065 | 20801 | 20816 | TCCGGGAAAAGAGTGA | 34 | 57 |
| 1161169 | 1089 | 1104 | 20840 | 20855 | CTCCAATAAGTGTAGA | 47 | 58 |
| 1161173 | 1171 | 1186 | 23046 | 23061 | AGAAGATAGCTGGTAG | 1 | 59 |
| 1161177 | 1274 | 1289 | 26947 | 26962 | ATCAAACACAACCTCG | 4^{†} | 60 |
| 1161181 | 1360 | 1375 | 27033 | 27048 | AAGGCCGAAGGAAGCA | 108 | 61 |
| 1161185 | 1430 | 1445 | 73462 | 73477 | GACTCGAATTCTGTCA | 65 | 62 |
| 1161189 | 1549 | 1564 | 76866 | 76881 | AAGTTAACAATGCCAG | 6 | 63 |
| 1161193 | 1761 | 1776 | 92533 | 92548 | GGTCTAAAACCCACAG | 84 | 64 |
| 1161197 | 1798 | 1813 | 92570 | 92585 | TTCTTTAACTTCCGTC | 10 | 65 |
| 1161201 | 1868 | 1883 | 109570 | 109585 | GAGAACTTCCGATACA | 13 | 66 |
| 1161205 | 2069 | 2084 | 116025 | 116040 | GAGCAAGTCTGACTGA | 21 | 67 |
| 1161209 | 2124 | 2139 | 116080 | 116095 | TTAAGTAATGCTCCAC | 37 | 68 |
| 1161213 | 2252 | 2267 | 116922 | 116937 | ATGCATTCGGATCTCG | 20 | 69 |
| 1161217 | 2377 | 2392 | 123737 | 123752 | ACCTTTACCCAATCAG | 19 | 70 |
| 1161221 | 2410 | 2425 | 126731 | 126746 | GAGTGAAAGCGGCTCA | 67 | 71 |
| 1161225 | 2522 | 2537 | 135571 | 135586 | GTGATAATGTTCACTG | 112 | 72 |
| 1161229 | 2589 | 2604 | 135638 | 135653 | TAGCGACCTTGGCCAG | 68 | 73 |
| 1161233 | 2696 | 2711 | 140805 | 140820 | ATATTGATCCTGTTCT | 43 | 74 |
| 1161237 | 2784 | 2799 | 161632 | 161647 | TTATGTAGGAGCTCTT | 24 | 75 |
| 1161241 | 2851 | 2866 | 161699 | 161714 | ATTGTCGCTTCTTCTG | 21 | 76 |
| 1161245 | 2863 | 2878 | 161711 | 161726 | TCCACAATCCCAATTG | 71 | 77 |
| 1161249 | 2901 | 2916 | 202137 | 202152 | ATATATTGTCTGCAGC | 64 | 78 |
| 1161253 | 3042 | 3057 | 202278 | 202293 | TAGCATAGGCAATGGC | 32 | 79 |
| 1161257 | 3100 | 3115 | 212832 | 212847 | GGATAATGGGTGACAA | 15 | 80 |
| 1161261 | 3170 | 3185 | 212902 | 212917 | ACTGACCAAGAATCCC | 25 | 81 |
| 1161265 | 3273 | 3288 | 221178 | 221193 | ATCCATAACTCCTTGC | 36 | 82 |
| 1161269 | 3552 | 3567 | 223920 | 223935 | GTTACTGGAGAGTTAT | 42 | 83 |
| 1161273 | 3694 | 3709 | 224062 | 224077 | AGTCTATTCAAGAGTG | 21 | 84 |
| 1161277 | 3831 | 3846 | 224199 | 224214 | GCCAATTATCTGAACT | 38 | 85 |
| 1161281 | 3867 | 3882 | 224235 | 224250 | GTTCAATGGATAGATT | 25 | 86 |
| 1161285 | 4357 | 4372 | 224725 | 224740 | TAATCCTATGACAATA | 69 | 87 |
| 1161289 | N/A | N/A | 9964 | 9979 | CGATATAATGGTGTGC | 10 | 88 |
| 1161293 | N/A | N/A | 13640 | 13655 | CTCAATAAAGAATCCC | 53 | 89 |
| 1161297 | N/A | N/A | 18570 | 18585 | TCCAATTAACTTTGGA | 82 | 90 |
| 1161301 | N/A | N/A | 29039 | 29054 | TACCATTTCTAGCAAG | 4 | 91 |
| | | | 29353 | 29368 | | | |
| 1161305 | N/A | N/A | 35211 | 35226 | GATAGTAAGACTGATT | 11 | 92 |
| 1161309 | N/A | N/A | 41982 | 41997 | CATACTAACTTACCAT | 44 | 93 |
| 1161313 | N/A | N/A | 48797 | 48812 | ATCAATAAACCTACTG | 62 | 94 |
| 1161317 | N/A | N/A | 50475 | 50490 | ATGCGATACCTAGCAC | 84 | 95 |
| 1161321 | N/A | N/A | 58187 | 58202 | ATCTATAAAACCCGTA | 47 | 96 |
| 1161325 | N/A | N/A | 61345 | 61360 | ATGTAACATGCCTCTC | 9 | 97 |
| | | | 62026 | 62041 | | | |
| 1161329 | N/A | N/A | 70415 | 70430 | GTATATTGATGTAGGT | 5 | 98 |
| 1161333 | N/A | N/A | 72658 | 72673 | TATAGTAAATTAGGTT | 88 | 99 |
| 1161337 | N/A | N/A | 77689 | 77704 | GTTAATCACTCTTGTA | 27 | 100 |
| 1161341 | N/A | N/A | 79306 | 79321 | GTTTATCAAGAGGTTA | 10 | 101 |
| 1161345 | N/A | N/A | 86816 | 86831 | CTTAGTAAAAGGCCCC | 47 | 102 |
| 1161349 | N/A | N/A | 99041 | 99056 | GATAATGTAAGAGCCC | 22 | 103 |
| 1161353 | N/A | N/A | 106028 | 106043 | ATAATTATGGAGGTCT | 38 | 104 |
| 1161357 | N/A | N/A | 108367 | 108382 | GGACTAAATGTATCAT | 26 | 105 |
| 1161361 | N/A | N/A | 113498 | 113513 | GTAATTACTAACCACA | 68 | 106 |
| 1161365 | N/A | N/A | 118028 | 118043 | GTTATATAGAGCTCTA | 12 | 107 |
| 1161369 | N/A | N/A | 125175 | 125190 | TAAATTACTGGGAGGC | 53 | 108 |
| 1161373 | N/A | N/A | 128934 | 128949 | GTCGGGTTGATTACTT | 18 | 109 |
| 1161377 | N/A | N/A | 134572 | 134587 | TATAGTAACTACTCTG | 60 | 110 |
| 1161381 | N/A | N/A | 143282 | 143297 | GCATTATATACTACCA | 13 | 111 |
| 1161385 | N/A | N/A | 148454 | 148469 | ACATAAAATCTATCGG | 60 | 112 |
| 1161389 | N/A | N/A | 153751 | 153766 | TACAATAATGAGCTCG | 91 | 113 |
| 1161393 | N/A | N/A | 167892 | 167907 | AATATGCAGGGACACA | 22 | 114 |
| | | | 169690 | 169705 | | | |
| 1161397 | N/A | N/A | 167908 | 167923 | TGGCATACTCAGTAAG | 33 | 115 |
| | | | 169706 | 169721 | | | |
| 1161401 | N/A | N/A | 169369 | 169384 | TATATTAGTAGCTGTA | 23 | 116 |
| 1161405 | N/A | N/A | 174220 | 174235 | ACATTTAAGCTTAGCA | 55 | 117 |
| 1161409 | N/A | N/A | 180670 | 180685 | GTGGTATTAACATCCA | 97 | 118 |
| | | | 182418 | 182433 | | | |
| 1161413 | N/A | N/A | 180800 | 180815 | AGTAGAGGCAATGATT | 26 | 119 |
| | | | 182544 | 182559 | | | |
| 1161417 | N/A | N/A | 180807 | 180822 | ATTGTTAAGTAGAGGC | 20 | 120 |
| | | | 182551 | 182566 | | | |
| 1161421 | N/A | N/A | 195215 | 195230 | GAAATTATGCAAGGGT | 30 | 121 |
| 1161425 | N/A | N/A | 200699 | 200714 | TCCAATAACTAGCGGC | 80 | 122 |
| 1161429 | N/A | N/A | 206995 | 207010 | GTAAATTTGTCAGGGA | 45 | 123 |
| 1161433 | N/A | N/A | 217515 | 217530 | GTAATTATGTACTCCT | 19 | 124 |

TABLE 4
Reduction of MSH3 RNA by 3-10-3 cEt gapmers
with phosphorothioate linkages in A431 cells

| | SEQ | SEQ | SEQ | SEQ | | | |
|---|---|---|---|---|---|---|---|
| | ID | ID | ID | ID | | | |
| | NO: 1 | NO: 1 | NO: 2 | NO: 2 | | MSH3 | SEQ |
| Compound | Start | Stop | Start | Stop | Sequence | (% | ID |
| Number | Site | Site | Site | Site | (5′ to 3′) | UTC) | No. |
| 1161129 | 103 | 118 | 2750 | 2765 | GCAGCGAGGCCGCCCG | 80 | 125 |
| 1161133 | 202 | 217 | 2849 | 2864 | TGGTCGGCTGCACCTG | 81 | 126 |
| 1161137 | 498 | 513 | 13202 | 13217 | CAGAATCGCAGCAGAA | 14 | 127 |
| 1161141 | 525 | 540 | 13229 | 13244 | CTGTCTGGACTCTACT | 28 | 128 |
| 1161142 | 538 | 553 | 13242 | 13257 | TCCTGCAGAGATTCTG | 18 | 51 |
| 1161146 | 682 | 697 | 18119 | 18134 | GATGATCCAAACTGAC | 8 | 129 |
| 1161150 | 771 | 786 | 18208 | 18223 | ATTGTAATTCTAGCGG | 8 | 130 |
| 1161154 | 881 | 896 | 20252 | 20267 | AATATTGAGCTCTCGG | 6 | 131 |
| 1161158 | 907 | 922 | 20278 | 20293 | ATAAAGTTGTGATCTA | 4 | 132 |
| 1161162 | 927 | 942 | 20298 | 20313 | GAGTAGGTATACTTGC | 17 | 133 |
| 1161166 | 1058 | 1073 | 20809 | 20824 | AGTCAATTTCCGGGAA | 2 | 134 |
| 1161170 | 1125 | 1140 | 23000 | 23015 | CAGCATCATCCAGCTT | 86 | 135 |
| 1161174 | 1173 | 1188 | 23048 | 23063 | ACAGAAGATAGCTGGT | 44 | 136 |
| 1161178 | 1299 | 1314 | 26972 | 26987 | AACGAGAAGCAGAGTC | 20^{†} | 137 |
| 1161182 | 1369 | 1384 | 27042 | 27057 | TGCTCGGACAAGGCCG | 112 | 138 |
| 1161186 | 1431 | 1446 | 73463 | 73478 | CGACTCGAATTCTGTC | 52 | 139 |
| 1161190 | 1587 | 1602 | 76904 | 76919 | TTATGATGGCAGCCAA | 21 | 140 |
| 1161194 | 1773 | 1788 | 92545 | 92560 | AAGTTTTAGTGTGGTC | 23 | 141 |
| 1161198 | 1826 | 1841 | 92598 | 92613 | TAATTTAAGGAGTGGC | 13 | 142 |
| 1161202 | 1927 | 1942 | 109629 | 109644 | ATGTCGGGCAATTTAC | 15 | 143 |
| 1161206 | 2084 | 2099 | 116040 | 116055 | TAAAATAACGGTCCGG | 56 | 144 |
| 1161210 | 2127 | 2142 | 116083 | 116098 | TCTTTAAGTAATGCTC | 64 | 145 |
| 1161214 | 2301 | 2316 | 116971 | 116986 | TCACATATTGTGCAGA | 37 | 146 |
| 1161218 | 2378 | 2393 | 123738 | 123753 | AACCTTTACCCAATCA | 26 | 147 |
| 1161222 | 2466 | 2481 | 126787 | 126802 | GGACTAGCTGCTCCCG | 56 | 148 |
| 1161226 | 2524 | 2539 | 135573 | 135588 | GAGTGATAATGTTCAC | 46 | 149 |
| 1161230 | 2606 | 2621 | 135655 | 135670 | GCAGTAATCTCCTTGC | 106 | 150 |
| 1161234 | 2697 | 2712 | 140806 | 140821 | CATATTGATCCTGTTC | 47 | 151 |
| 1161238 | 2804 | 2819 | 161652 | 161667 | GGTAATCAATGCAACT | 44 | 152 |
| 1161242 | 2853 | 2868 | 161701 | 161716 | CAATTGTCGCTTCTTC | 67 | 153 |
| 1161246 | 2892 | 2907 | 202128 | 202143 | CTGCAGCACCCATCCT | 57 | 154 |
| 1161250 | 2985 | 3000 | 202221 | 202236 | AGATAACCAAGGACTG | 70 | 155 |
| 1161254 | 3043 | 3058 | 202279 | 202294 | GTAGCATAGGCAATGG | 24 | 156 |
| 1161258 | 3101 | 3116 | 212833 | 212848 | CGGATAATGGGTGACA | 17 | 157 |
| 1161262 | 3248 | 3263 | 221153 | 221168 | TCTAGTTATTTGGTAA | 56 | 158 |
| 1161266 | 3291 | 3306 | 221196 | 221211 | CTAGTTTAGCCACATT | 45 | 159 |
| 1161270 | 3555 | 3570 | 223923 | 223938 | GCTGTTACTGGAGAGT | 31 | 160 |
| 1161274 | 3787 | 3802 | 224155 | 224170 | TTATATCACCCTCCAA | 34 | 161 |
| 1161278 | 3847 | 3862 | 224215 | 224230 | CCAGATTCACCCAGTT | 18 | 162 |
| 1161282 | 3899 | 3914 | 224267 | 224282 | GGATAAACTGGTTGCA | 34 | 163 |
| 1161286 | 4359 | 4374 | 224727 | 224742 | CTTAATCCTATGACAA | 35 | 164 |
| 1161290 | N/A | N/A | 9968 | 9983 | AATACGATATAATGGT | 46 | 165 |
| 1161294 | N/A | N/A | 14619 | 14634 | AGCAATAATGTATACG | 40 | 166 |
| 1161298 | N/A | N/A | 20070 | 20085 | CCTGTATAGAAGCCTA | 46 | 167 |
| 1161302 | N/A | N/A | 29041 | 29056 | ATTACCATTTCTAGCA | 2 | 168 |
| | | | 29355 | 29370 | | | |
| 1161306 | N/A | N/A | 36063 | 36078 | AACTATAACAGAGTCA | 11 | 169 |
| 1161310 | N/A | N/A | 42287 | 42302 | CTTACTAATTACTTCC | 21 | 170 |
| 1161314 | N/A | N/A | 49685 | 49700 | GGAGATAAGCAAGCCC | 82 | 171 |
| 1161318 | N/A | N/A | 54942 | 54957 | AGTTATATTGATGTGT | 10 | 172 |
| 1161322 | N/A | N/A | 59123 | 59138 | AGTCTATACTAGGTAA | 34 | 173 |
| 1161326 | N/A | N/A | 61978 | 61993 | GGTAATAAACCTTGCA | 72 | 174 |
| 1161330 | N/A | N/A | 71715 | 71730 | TATATTACCATGCATG | 39 | 175 |
| 1161334 | N/A | N/A | 73977 | 73992 | GATACTAATGAGCCAT | 39 | 176 |
| 1161338 | N/A | N/A | 77858 | 77873 | TCAATATAATGGAGGG | 65 | 177 |
| 1161342 | N/A | N/A | 79766 | 79781 | AGTAATCACCTTAAGA | 46 | 178 |
| 1161346 | N/A | N/A | 87329 | 87344 | AACAATTAGGCAGTGA | 30 | 179 |
| 1161350 | N/A | N/A | 102327 | 102342 | TATATTATGGCTCCAT | 10 | 180 |
| 1161354 | N/A | N/A | 106850 | 106865 | ACATATAAGACAGCCT | 51 | 181 |
| 1161358 | N/A | N/A | 108423 | 108438 | GATTTTACCAACGGCT | 73 | 182 |
| 1161362 | N/A | N/A | 114294 | 114309 | AGCAATAATATGTTAG | 36 | 183 |
| 1161366 | N/A | N/A | 118934 | 118949 | TACAATTAGTTGATCT | 23 | 184 |
| 1161370 | N/A | N/A | 126568 | 126583 | TTAATTATGGTCCTGA | 33 | 185 |
| 1161374 | N/A | N/A | 129946 | 129961 | CTTAGTAATTAGAGTA | 36 | 186 |
| 1161378 | N/A | N/A | 136888 | 136903 | AATAATCTAGATGCCT | 36 | 187 |
| 1161382 | N/A | N/A | 143641 | 143656 | CTTAGGTTGCTATGGT | 18 | 188 |
| 1161386 | N/A | N/A | 148609 | 148624 | AGAATATATGACCCCC | 36 | 189 |
| 1161390 | N/A | N/A | 156822 | 156837 | GTAAGTAAGTCTGACA | 127 | 190 |
| 1161394 | N/A | N/A | 167893 | 167908 | GAATATGCAGGGACAC | 17 | 191 |
| | | | 169691 | 169706 | | | |
| 1161398 | N/A | N/A | 167909 | 167924 | TTGGCATACTCAGTAA | 50 | 192 |
| | | | 169707 | 169722 | | | |
| 1161402 | N/A | N/A | 170234 | 170249 | AAGTATAACATGTCTG | 35 | 193 |
| 1161406 | N/A | N/A | 179103 | 179118 | AATTTTATAACGAGCT | 65 | 194 |
| 1161410 | N/A | N/A | 180671 | 180686 | AGTGGTATTAACATCC | 25 | 195 |
| | | | 182419 | 182434 | | | |
| 1161414 | N/A | N/A | 180804 | 180819 | GTTAAGTAGAGGCAAT | 25 | 196 |
| | | | 182548 | 182563 | | | |
| 1161418 | N/A | N/A | 180808 | 180823 | AATTGTTAAGTAGAGG | 16 | 197 |
| | | | 182552 | 182567 | | | |
| 1161422 | N/A | N/A | 195842 | 195857 | AGATTTAAAACACGGA | 78 | 198 |
| 1161426 | N/A | N/A | 201007 | 201022 | ATTAGGTAATACTCAG | 38 | 199 |
| 1161430 | N/A | N/A | 212569 | 212584 | TGAGAATTAGTTGCAG | 43 | 200 |
| 1161434 | N/A | N/A | 217615 | 217630 | TCATTATATGCTGGTC | 24 | 201 |

TABLE 5
Reduction of MSH3 RNA by 3-10-3 cEt gapmers
with phosphorothioate linkages in A431 cells

| | SEQ | SEQ | SEQ | SEQ | | | |
|---|---|---|---|---|---|---|---|
| | ID | ID | ID | ID | | | |
| | NO: 1 | NO: 1 | NO: 2 | NO: 2 | | MSH3 | SEQ |
| Compound | Start | Stop | Start | Stop | Sequence | (% | ID |
| Number | Site | Site | Site | Site | (5′ to 3′) | UTC) | No. |
| 1161130 | 144 | 159 | 2791 | 2806 | ATCGGCTCAAAACCGC | 62 | 202 |
| 1161134 | 363 | 378 | 4456 | 4471 | TCTTTTTAACAGGCCC | 12 | 203 |
| 1161138 | 499 | 514 | 13203 | 13218 | GCAGAATCGCAGCAGA | 43 | 204 |
| 1161142 | 538 | 553 | 13242 | 13257 | TCCTGCAGAGATTCTG | 13 | 51 |
| 1161143 | 594 | 609 | 13298 | 13313 | CGTGTAGAAGACTGAT | 6 | 205 |
| 1161147 | 688 | 703 | 18125 | 18140 | GTATTTGATGATCCAA | 2 | 206 |
| 1161151 | 874 | 889 | 20245 | 20260 | AGCTCTCGGGCTGCAA | 80 | 207 |
| 1161155 | 882 | 897 | 20253 | 20268 | AAATATTGAGCTCTCG | 6 | 208 |
| 1161159 | 908 | 923 | 20279 | 20294 | CATAAAGTTGTGATCT | 7 | 209 |
| 1161163 | 943 | 958 | 20314 | 20329 | TGAACAAACAGTCTGT | 10 | 210 |
| 1161167 | 1087 | 1102 | 20838 | 20853 | CCAATAAGTGTAGATT | 26 | 211 |
| 1161171 | 1159 | 1174 | 23034 | 23049 | GTAGAAGTATCAGTCA | 1 | 212 |
| 1161175 | 1268 | 1283 | 26941 | 26956 | CACAACCTCGCCTGTG | 51^{†} | 213 |
| 1161179 | 1303 | 1318 | 26976 | 26991 | TCTGAACGAGAAGCAG | 49^{†} | 214 |
| 1161183 | 1428 | 1443 | 73460 | 73475 | CTCGAATTCTGTCATC | 15 | 215 |
| 1161187 | 1442 | 1457 | 73474 | 73489 | ATCCATCCTTTCGACT | 31 | 216 |
| 1161191 | 1654 | 1669 | 89469 | 89484 | CTTGATAGCTGTTTAA | 10 | 217 |
| 1161195 | 1795 | 1810 | 92567 | 92582 | TTTAACTTCCGTCTCC | 15 | 218 |
| 1161199 | 1845 | 1860 | 109547 | 109562 | GCCGGGCATTTATTTC | 66 | 219 |
| 1161203 | 1928 | 1943 | 109630 | 109645 | TATGTCGGGCAATTTA | 20 | 220 |
| 1161207 | 2087 | 2102 | 116043 | 116058 | TTCTAAAATAACGGTC | 37 | 221 |
| 1161211 | 2237 | 2252 | 116907 | 116922 | GTCAATAACACCTTGA | 35 | 222 |
| 1161215 | 2357 | 2372 | 123717 | 123732 | TATACAAGATACAGCA | 39 | 223 |
| 1161219 | 2403 | 2418 | 126724 | 126739 | AGCGGCTCACAGCTTT | 32 | 224 |
| 1161223 | 2468 | 2483 | 126789 | 126804 | AAGGACTAGCTGCTCC | 79 | 225 |
| 1161227 | 2536 | 2551 | 135585 | 135600 | GCTTTACACAAGGAGT | 15 | 226 |
| 1161231 | 2669 | 2684 | 140778 | 140793 | ATCAATCACAGGGTGC | 26 | 227 |
| 1161235 | 2698 | 2713 | 140807 | 140822 | ACATATTGATCCTGTT | 100 | 228 |
| 1161239 | 2823 | 2838 | 161671 | 161686 | AGCCAATCTGAGCCAT | 62 | 229 |
| 1161243 | 2859 | 2874 | 161707 | 161722 | CAATCCCAATTGTCGC | 68 | 230 |
| 1161247 | 2899 | 2914 | 202135 | 202150 | ATATTGTCTGCAGCAC | 47 | 231 |
| 1161251 | 2986 | 3001 | 202222 | 202237 | AAGATAACCAAGGACT | 51 | 232 |
| 1161255 | 3082 | 3097 | 212814 | 212829 | AGGGTTAAGGATTTCA | 20 | 233 |
| 1161259 | 3102 | 3117 | 212834 | 212849 | GCGGATAATGGGTGAC | 25 | 234 |
| 1161263 | 3249 | 3264 | 221154 | 221169 | CTCTAGTTATTTGGTA | 24 | 235 |
| 1161267 | 3339 | 3354 | 221244 | 221259 | CTTTTGACTTGTGAGC | 52 | 236 |
| 1161271 | 3561 | 3576 | 223929 | 223944 | AGATAGGCTGTTACTG | 59 | 237 |
| 1161275 | 3788 | 3803 | 224156 | 224171 | TTTATATCACCCTCCA | 27 | 238 |
| 1161279 | 3859 | 3874 | 224227 | 224242 | GATAGATTCCTGCCAG | 24 | 239 |
| 1161283 | 3900 | 3915 | 224268 | 224283 | TGGATAAACTGGTTGC | 15 | 240 |
| 1161287 | 4362 | 4377 | 224730 | 224745 | CTGCTTAATCCTATGA | 27 | 241 |
| 1161291 | N/A | N/A | 10035 | 10050 | ATTAGGTAGCATATGG | 8 | 242 |
| 1161295 | N/A | N/A | 17063 | 17078 | AGCAATAAGAAGACGG | 34 | 243 |
| 1161299 | N/A | N/A | 22063 | 22078 | GTTAATAGTTTGGAGC | 46 | 244 |
| 1161303 | N/A | N/A | 29313 | 29328 | ACAATATAGAAGCCTA | 11 | 245 |
| 1161307 | N/A | N/A | 38773 | 38788 | CTTAGGTTAAGGTCTT | 3 | 246 |
| 1161311 | N/A | N/A | 44034 | 44049 | CTCGGGTTTCAACGGA | 67 | 247 |
| 1161315 | N/A | N/A | 49774 | 49789 | ATTAGTAAGAAGTCTC | 77 | 248 |
| 1161319 | N/A | N/A | 57178 | 57193 | ATCGCTAATGTGGGTC | 15 | 249 |
| 1161323 | N/A | N/A | 61343 | 61358 | GTAACATGCCTCTCTG | 5 | 250 |
| | | | 62024 | 62039 | | | |
| 1161327 | N/A | N/A | 63213 | 63228 | ACCTATAAAGTAGTGC | 64 | 251 |
| 1161331 | N/A | N/A | 72225 | 72240 | AGTATATAGATGCCAC | 6 | 252 |
| 1161335 | N/A | N/A | 76241 | 76256 | TCATCCTTGCACCCTA | 16 | 253 |
| | N/A | N/A | 77078 | 77093 | | | |
| 1161339 | N/A | N/A | 78047 | 78062 | GGAGAACGCACATCAA | 19 | 254 |
| 1161343 | N/A | N/A | 79875 | 79890 | GATAACATAGCTTTGT | 12 | 255 |
| 1161347 | N/A | N/A | 93584 | 93599 | AGGTATAACTATTCAG | 33 | 256 |
| 1161351 | N/A | N/A | 102463 | 102478 | ATTATACCTTGACCAG | 11 | 257 |
| 1161355 | N/A | N/A | 107134 | 107149 | GATAACAATTTGTGCT | 58 | 258 |
| 1161359 | N/A | N/A | 110090 | 110105 | CATACTAACTACCACC | 39 | 259 |
| 1161363 | N/A | N/A | 116325 | 116340 | GTACTATATCTGTCCT | 54 | 260 |
| 1161367 | N/A | N/A | 122073 | 122088 | GTATTATTGCAACCAA | 9 | 261 |
| 1161371 | N/A | N/A | 126934 | 126949 | TATTTTATGGTGGGTC | 23 | 262 |
| 1161375 | N/A | N/A | 130731 | 130746 | CATAACAATCAATGCT | 68 | 263 |
| 1161379 | N/A | N/A | 138302 | 138317 | ATTAGGTTCAATAGGC | 58 | 264 |
| 1161383 | N/A | N/A | 144692 | 144707 | CACTATAATAAGTTCA | 45 | 265 |
| 1161387 | N/A | N/A | 151469 | 151484 | TCTGATAAAGGAACGC | 50 | 266 |
| 1161391 | N/A | N/A | 157348 | 157363 | AAGTATTAACTTGGTA | 56 | 267 |
| 1161395 | N/A | N/A | 167894 | 167909 | AGAATATGCAGGGACA | 15 | 268 |
| | | | 169692 | 169707 | | | |
| 1161399 | N/A | N/A | 167912 | 167927 | TTCTTGGCATACTCAG | 9 | 269 |
| | | | 169710 | 169725 | | | |
| 1161403 | N/A | N/A | 171438 | 171453 | GATATATTGAAGTGCC | 17 | 270 |
| 1161407 | N/A | N/A | 180668 | 180683 | GGTATTAACATCCACA | 65 | 271 |
| | | | 182416 | 182431 | | | |
| 1161411 | N/A | N/A | 180690 | 180705 | TTTCTTAGGTACACAG | 14 | 272 |
| | | | 182438 | 182453 | | | |
| 1161415 | N/A | N/A | 180805 | 180820 | TGTTAAGTAGAGGCAA | 20 | 273 |
| | | | 182549 | 182564 | | | |
| 1161419 | N/A | N/A | 184119 | 184134 | ATTACGATATCCTTGT | 23 | 274 |
| 1161423 | N/A | N/A | 198783 | 198798 | ACAGAACAAGTACCAT | 58 | 275 |
| 1161427 | N/A | N/A | 201129 | 201144 | TGATTTAACCATGGTC | 41 | 276 |
| 1161431 | N/A | N/A | 215634 | 215649 | GATATTAGTAGTAGCC | 32 | 277 |
| 1161435 | N/A | N/A | 218324 | 218339 | TATAATCTAGATCCCA | 38 | 278 |

TABLE 6
Reduction of MSH3 RNA by 3-10-3 cEt gapmers with phosphorothioate linkages in A431 cells

| | SEQ | SEQ | SEQ | SEQ | | | |
|---|---|---|---|---|---|---|---|
| | ID | ID | ID | ID | | | |
| | NO: 1 | NO: 1 | NO: 2 | NO: 2 | | MSH3 | SEQ |
| Compound | Start | Stop | Start | Stop | | (% | ID |
| Number | Site | Site | Site | Site | Sequence (5′ to 3′) | UTC) | No. |
| 1161131 | 150 | 165 | 2797 | 2812 | GGAAGAATCGGCTCAA | 15 | 279 |
| 1161135 | 457 | 472 | 13161 | 13176 | GAAACATTCCTGGTCC | 14 | 280 |
| 1161139 | 519 | 534 | 13223 | 13238 | GGACTCTACTTTGAGG | 63 | 281 |
| 1161142 | 538 | 553 | 13242 | 13257 | TCCTGCAGAGATTCTG | 23 | 51 |
| 1161144 | 627 | 642 | 13331 | 13346 | GTTTCGAATCTTCAGA | 53 | 282 |
| 1161148 | 745 | 760 | 18182 | 18197 | CTTTTGGACCGTTTGT | 1 | 283 |
| 1161152 | 878 | 893 | 20249 | 20264 | ATTGAGCTCTCGGGCT | 9 | 284 |
| 1161156 | 900 | 915 | 20271 | 20286 | TGTGATCTAAATGGCA | 6 | 285 |
| 1161160 | 921 | 936 | 20292 | 20307 | GTATACTTGCTGTCAT | 6 | 286 |
| 1161164 | 944 | 959 | 20315 | 20330 | ATGAACAAACAGTCTG | 5 | 287 |
| 1161168 | 1088 | 1103 | 20839 | 20854 | TCCAATAAGTGTAGAT | 15 | 288 |
| 1161172 | 1164 | 1179 | 23039 | 23054 | AGCTGGTAGAAGTATC | 22 | 289 |
| 1161176 | 1273 | 1288 | 26946 | 26961 | TCAAACACAACCTCGC | 11† | 290 |
| 1161180 | 1317 | 1332 | 26990 | 27005 | TCCGGGTTTCTAGCTC | 4† | 291 |
| 1161184 | 1429 | 1444 | 73461 | 73476 | ACTCGAATTCTGTCAT | 10 | 292 |
| 1161188 | 1487 | 1502 | 73519 | 73534 | CTCTGTAACTGCCTGG | 5 | 293 |
| 1161192 | 1659 | 1674 | 89474 | 89489 | TTTTACTTGATAGCTG | 10 | 294 |
| 1161196 | 1797 | 1812 | 92569 | 92584 | TCTTTAACTTCCGTCT | 11 | 295 |
| 1161200 | 1861 | 1876 | 109563 | 109578 | TCCGATACAGCATCAA | 15 | 296 |
| 1161204 | 1983 | 1998 | 115939 | 115954 | AGAAGAACTCTTGGGT | 16 | 297 |
| 1161208 | 2123 | 2138 | 116079 | 116094 | TAAGTAATGCTCCACT | 50 | 298 |
| 1161212 | 2238 | 2253 | 116908 | 116923 | CGTCAATAACACCTTG | 13 | 299 |
| 1161216 | 2358 | 2373 | 123718 | 123733 | GTATACAAGATACAGC | 31 | 300 |
| 1161220 | 2409 | 2424 | 126730 | 126745 | AGTGAAAGCGGCTCAC | 67 | 301 |
| 1161224 | 2472 | 2487 | 126793 | 126808 | AGTCAAGGACTAGCTG | 58 | 302 |
| 1161228 | 2551 | 2566 | 135600 | 135615 | GCTAGGTGATGCACTG | 28 | 303 |
| 1161232 | 2694 | 2709 | 140803 | 140818 | ATTGATCCTGTTCTCC | 9 | 304 |
| 1161236 | 2699 | 2714 | 140808 | 140823 | GACATATTGATCCTGT | 56 | 305 |
| 1161240 | 2829 | 2844 | 161677 | 161692 | CATAGGAGCCAATCTG | 22 | 306 |
| 1161244 | 2862 | 2877 | 161710 | 161725 | CCACAATCCCAATTGT | 65 | 307 |
| 1161248 | 2900 | 2915 | 202136 | 202151 | TATATTGTCTGCAGCA | 66 | 308 |
| 1161252 | 3040 | 3055 | 202276 | 202291 | GCATAGGCAATGGCAA | 58 | 309 |
| 1161256 | 3083 | 3098 | 212815 | 212830 | CAGGGTTAAGGATTTC | 9 | 310 |
| 1161260 | 3105 | 3120 | 212837 | 212852 | CTGGCGGATAATGGGT | 51 | 311 |
| 1161264 | 3272 | 3287 | 221177 | 221192 | TCCATAACTCCTTGCT | 29 | 312 |
| 1161268 | 3384 | 3399 | 223752 | 223767 | AATACTTGAGTCTCTT | 38 | 313 |
| 1161272 | 3566 | 3581 | 223934 | 223949 | CACAAAGATAGGCTGT | 48 | 314 |
| 1161276 | 3789 | 3804 | 224157 | 224172 | TTTTATATCACCCTCC | 28 | 315 |
| 1161280 | 3860 | 3875 | 224228 | 224243 | GGATAGATTCCTGCCA | 87 | 316 |
| 1161284 | 3901 | 3916 | 224269 | 224284 | GTGGATAAACTGGTTG | 25 | 317 |
| 1161288 | N/A | N/A | 4715 | 4730 | GCAGAATTGTAGCTCT | 48 | 318 |
| 1161292 | N/A | N/A | 11619 | 11634 | GTATATTTGTATCGCT | 4 | 319 |
| 1161296 | N/A | N/A | 18041 | 18056 | CACAATAATAAGTTCC | 104 | 320 |
| 1161300 | N/A | N/A | 28500 | 28515 | GATATACACACACGGA | 5 | 321 |
| 1161304 | N/A | N/A | 32726 | 32741 | TACGATAATGATGCCC | 6 | 322 |
| 1161308 | N/A | N/A | 40266 | 40281 | TCTATCTAACATATAC | 71 | 323 |
| | | | 40293 | 40308 | | | |
| 1161312 | N/A | N/A | 45332 | 45347 | GTAAGTAAACCAGGTG | 4 | 324 |
| 1161316 | N/A | N/A | 50471 | 50486 | GATACCTAGCACTCCT | 15 | 325 |
| 1161320 | N/A | N/A | 58079 | 58094 | GTAATTAATGCTGGTT | 28 | 326 |
| 1161324 | N/A | N/A | 61344 | 61359 | TGTAACATGCCTCTCT | 12 | 327 |
| | | | 62025 | 62040 | | | |
| 1161328 | N/A | N/A | 67792 | 67807 | GGATATAAGAATTGGT | 12 | 328 |
| 1161332 | N/A | N/A | 72650 | 72665 | ATTAGGTTAACTCTCA | 12 | 329 |
| 1161336 | N/A | N/A | 76649 | 76664 | ATTACTAATACCCAGG | 84 | 330 |
| 1161340 | N/A | N/A | 78097 | 78112 | TAGGATAAAGTTGCTT | 47 | 331 |
| 1161344 | N/A | N/A | 86410 | 86425 | ATTATAATGTTGCACA | 89 | 332 |
| 1161348 | N/A | N/A | 95796 | 95811 | TACGCTAAAACCCAGA | 30 | 333 |
| 1161352 | N/A | N/A | 102762 | 102777 | AGAGAACATTGACCAC | 20 | 334 |
| 1161356 | N/A | N/A | 107952 | 107967 | TATACTAACTTCAGGC | 57 | 335 |
| 1161360 | N/A | N/A | 112728 | 112743 | AGTTATTATGGGTTCC | 13 | 336 |
| 1161364 | N/A | N/A | 116799 | 116814 | AATACATATTCGAAGT | 60 | 337 |
| 1161368 | N/A | N/A | 124783 | 124798 | CACTATTACCAGCTAC | 29 | 338 |
| 1161372 | N/A | N/A | 128914 | 128929 | TACAATAAAGCTCCCT | 48 | 339 |
| 1161376 | N/A | N/A | 132793 | 132808 | ACAAATAATACGATTC | 59 | 340 |
| 1161380 | N/A | N/A | 142065 | 142080 | AACAATTAGTAAACCC | 72 | 341 |
| 1161384 | N/A | N/A | 144693 | 144708 | GCACTATAATAAGTTC | 56 | 342 |
| 1161388 | N/A | N/A | 152136 | 152151 | CATAGTAACTAAAGCA | 95 | 343 |
| 1161392 | N/A | N/A | 161046 | 161061 | GCAGAATTGTAACTCT | 100 | 344 |
| 1161396 | N/A | N/A | 167895 | 167910 | AAGAATATGCAGGGAC | 14 | 345 |
| | | | 169693 | 169708 | | | |
| 1161400 | N/A | N/A | 169122 | 169137 | GTAACTAATATTACCA | 43 | 346 |
| 1161404 | N/A | N/A | 172913 | 172928 | TATACTAAAGGGCAGT | 47 | 347 |
| 1161408 | N/A | N/A | 180669 | 180684 | TGGTATTAACATCCAC | 66 | 348 |
| | | | 182417 | 182432 | | | |
| 1161412 | N/A | N/A | 180695 | 180710 | TAGCATTTCTTAGGTA | 25 | 349 |
| | | | 182443 | 182458 | | | |
| 1161416 | N/A | N/A | 180806 | 180821 | TTGTTAAGTAGAGGCA | 14 | 350 |
| | | | 182550 | 182565 | | | |
| 1161420 | N/A | N/A | 186095 | 186110 | GATATTAATTTCACGA | 374 | 351 |
| 1161424 | N/A | N/A | 199028 | 199043 | GCATCGGAAAATGGTT | 40 | 352 |
| 1161428 | N/A | N/A | 202072 | 202087 | CTTATTAGGAAGCCGA | 65 | 353 |
| 1161432 | N/A | N/A | 215635 | 215650 | TGATATTAGTAGTAGC | 30 | 354 |
| 1161436 | N/A | N/A | 223297 | 223312 | GCAGAATAGCAACCCA | 51 | 355 |

### Example 3: Effects of Modified Oligonucleotides on Human MSH3 RNA In Vitro, Multiple Doses

[0342] Modified oligonucleotides selected from the examples above were tested at various doses in A-431 cells. Cultured A-431 cells at a density of 10,000 cells per well were treated using free uptake with various concentrations of modified oligonucleotide as specified in Tables 7-9 below. After a treatment period of approximately 48 hours, MSH3 RNA levels were measured as previously described using the Human MSH3 primer-probe set RTS40982 (described herein above). MSH3 RNA levels were normalized to total RNA, as measured by RIBOGREEN®. Results are presented in the tables below as percent MSH3 RNA levels, relative to untreated control (% UTC). Where possible, the half maximal inhibitory concentration (IC₅₀) of each modified oligonucleotide was calculated using a linear regression on a log/linear plot of the data in excel.

TABLE 7
Dose-dependent reduction of human MSH3 RNA
in A-431 cells by modified oligonucleotides

| Compound | MSH3 (% UTC) | | | | IC₅₀ |
|---|---|---|---|---|---|
| Number | 31 nM | 125 nM | 500 nM | 2000 nM | μM |
| 1161142 | 42 | 25 | 11 | 6 | <0.03 |
| 1161149 | 8 | 2 | 1 | 1 | <0.03 |
| 1161150 | 57 | 23 | 9 | 4 | <0.03 |
| 1161153 | 24 | 13 | 6 | 2 | <0.03 |
| 1161154 | 46 | 13 | 5 | 2 | <0.03 |
| 1161158 | 60 | 18 | 4 | 1 | <0.03 |
| 1161161 | 13 | 3 | 2 | 2 | <0.03 |
| 1161166 | 34 | 10 | 2 | 1 | <0.03 |
| 1161173 | 19 | 5 | 1 | 1 | <0.03 |
| 1161189 | 19 | 6 | 3 | 3 | <0.03 |
| 1161197 | 47 | 19 | 8 | 6 | <0.03 |
| 1161289 | 45 | 25 | 13 | 7 | <0.03 |
| 1161301 | 41 | 27 | 8 | 3 | <0.03 |
| 1161302 | 51 | 23 | 8 | 1 | <0.03 |
| 1161305 | 56 | 31 | 10 | 5 | 0.04 |
| 1161325 | 72 | 31 | 16 | 6 | 0.07 |
| 1161329 | 19 | 5 | 3 | 2 | <0.03 |
| 1161341 | 45 | 10 | 5 | 3 | <0.03 |
| 1161365 | 29 | 11 | 8 | 4 | <0.03 |

TABLE 8
Dose-dependent reduction of human MSH3 RNA
in A-431 cells by modified oligonucleotides

| Compound | MSH3 (% UTC) | | | | IC₅₀ |
|---|---|---|---|---|---|
| Number | 31 nM | 125 nM | 500 nM | 2000 nM | μM |
| 1161142 | 65 | 36 | 16 | 12 | 0.06 |
| 1161143 | 51 | 24 | 13 | 6 | <0.03 |
| 1161146 | 60 | 37 | 16 | 10 | 0.05 |
| 1161147 | 25 | 6 | 3 | 2 | <0.03 |
| 1161155 | 49 | 21 | 9 | 4 | <0.03 |
| 1161159 | 52 | 19 | 11 | 4 | <0.03 |
| 1161163 | 98 | 48 | 20 | 7 | 0.19 |
| 1161171 | 25 | 7 | 2 | 1 | <0.03 |
| 1161191 | 98 | 34 | 19 | 10 | 0.15 |
| 1161198 | 51 | 23 | 16 | 17 | <0.03 |
| 1161291 | 64 | 31 | 15 | 6 | 0.05 |
| 1161306 | 56 | 48 | 25 | 13 | 0.07 |
| 1161307 | 41 | 15 | 5 | 3 | <0.03 |
| 1161318 | 77 | 37 | 14 | 10 | 0.10 |
| 1161323 | 34 | 15 | 5 | 4 | <0.03 |
| 1161331 | 48 | 20 | 9 | 6 | <0.03 |
| 1161350 | 71 | 39 | 21 | 11 | 0.09 |
| 1161367 | 55 | 25 | 11 | 9 | <0.03 |
| 1161399 | 61 | 33 | 16 | 8 | 0.05 |

TABLE 9
Dose-dependent reduction of human MSH3 RNA
in A-431 cells by modified oligonucleotides

| Compound | MSH3 (% UTC) | | | | IC₅₀ |
|---|---|---|---|---|---|
| Number | 31 nM | 125 nM | 500 nM | 2000 nM | μM |
| 1161134 | 50 | 32 | 17 | 11 | <0.03 |
| 1161142 | 67 | 39 | 22 | 13 | 0.08 |
| 1161148 | 28 | 7 | 3 | 2 | <0.03 |
| 1161152 | 75 | 43 | 20 | 8 | 0.11 |
| 1161156 | 48 | 17 | 7 | 4 | <0.03 |
| 1161160 | 54 | 25 | 12 | 6 | <0.03 |
| 1161164 | 74 | 37 | 13 | 5 | 0.09 |
| 1161184 | 77 | 44 | 21 | 11 | 0.12 |
| 1161188 | 39 | 11 | 4 | 2 | <0.03 |
| 1161192 | 75 | 44 | 24 | 13 | 0.12 |
| 1161196 | 68 | 38 | 19 | 10 | 0.08 |
| 1161232 | 49 | 23 | 7 | 2 | <0.03 |
| 1161256 | 33 | 12 | 5 | 3 | <0.03 |
| 1161292 | 44 | 19 | 8 | 5 | <0.03 |
| 1161300 | 61 | 34 | 13 | 6 | 0.05 |
| 1161303 | 76 | 52 | 19 | 7 | 0.13 |
| 1161304 | 47 | 23 | 5 | 1 | <0.03 |
| 1161312 | 54 | 21 | 7 | 4 | <0.03 |
| 1161351 | 60 | 29 | 22 | 17 | 0.04 |

### Example 4: Effects of 5-10-5 MOE Gapmer Modified Oligonucleotides on Human MSH3 In Vitro, Single Dose

[0343] Modified oligonucleotides complementary to an MSH3 nucleic acid were synthesized and tested for their effect on MSH3 RNA levels in vitro. The modified oligonucleotides were tested in a series of experiments using the same culture conditions.

[0344] The modified oligonucleotides in Tables 10 to 33 below are 5-10-5 MOE gapmers (i.e., they have a central gap segment of ten 2′-β-D-deoxynucleosides flanked on each side by wing segments, each wing segment consisting of five 2′-MOE modified nucleosides). The internucleoside linkage motif for the gapmers is (from 5′ to 3′): sooosssssssssssooss; wherein each ‘o’ represents a phosphodiester internucleoside linkage and each ‘s’ represents a phosphorothioate internucleoside linkage. All cytosine nucleobases throughout each modified oligonucleotide are 5-methylcytosines.

[0345] “Start site” indicates the 5′-most nucleoside of the target sequence to which the modified oligonucleotide is complementary. “Stop site” indicates the 3′-most nucleoside of the target sequence to which the modified oligonucleotide is complementary. As shown in the tables below, the modified oligonucleotides are complementary to either SEQ ID NO: 1 (GENBANK Accession No. NM_002439.4), to SEQ ID NO: 2 (GENBANK Accession No. NC_000005.10 truncated from nucleotides 80652001 to 80880000), or to both.

[0346] Cultured A431 cells were treated using free uptake with 4000 nM of modified oligonucleotide. After a treatment period of approximately 48 hours, RNA was isolated from the cells and MSH3 RNA levels were measured by quantitative real-time RTPCR. Human primer probe set RTS40982 (described herein above) was used to measure RNA levels. MSH3 RNA levels were normalized to total RNA content, as measured by RIBOGREEN®. Results are presented as percent MSH3 RNA, relative to untreated control cells (% UTC). The values marked by the symbol “f” indicate that the modified oligonucleotide is complementary to the amplicon region of the primer probe set. Additional assays may be used to measure the potency and efficacy of the modified oligonucleotides complementary to the amplicon region.

TABLE 10
Reduction of MSH3 RNA by 5-10-5 MOE gapmers with mixed internucleoside linkages in A431 cells

| | SEQ | SEQ | SEQ | SEQ | | | |
|---|---|---|---|---|---|---|---|
| | ID | ID | ID | ID | | | |
| | NO: 1 | NO: 1 | NO: 2 | NO: 2 | | MSH3 | SEQ |
| Compound | Start | Stop | Start | Stop | | (% | ID |
| Number | Site | Site | Site | Site | Sequence (5′ to 3′) | UTC) | No. |
| 1479807 | 1444 | 1463 | 73476 | 73495 | AATGTTATCCATCCTTTCGA | 33 | 356 |
| 1479811 | N/A | N/A | 123277 | 123296 | TCTGAGATATGATCCTCCCC | 49 | 357 |
| 1479866 | 1942 | 1961 | 109644 | 109663 | GCTACAGAGTCCCCTCTCTA | 31 | 358 |
| 1479875 | N/A | N/A | 76051 | 76070 | ACCTAATGTTCTCCCCATCA | 99 | 359 |
| 1479903 | 1058 | 1077 | 20809 | 20828 | GGGCAGTCAATTTCCGGGAA | 12 | 360 |
| 1479906 | 1126 | 1145 | 23001 | 23020 | ATTTACAGCATCATCCAGCT | 17 | 361 |
| 1479909 | N/A | N/A | 182503 | 182522 | TTTGACTTACTTCAAGTGCT | 20 | 362 |
| 1479964 | N/A | N/A | 186633 | 186652 | GAATGTATTAATCCATGCTC | 34 | 363 |
| 1479971 | N/A | N/A | 148081 | 148100 | TAGCATCAATCAATAAGATC | 96 | 364 |
| 1479990 | N/A | N/A | 46649 | 46668 | AGCTTTATACACCCTTTCTC | 17 | 365 |
| 1480024 | N/A | N/A | 143002 | 143021 | TGTTTCTAACCACCTTGCTT | 97 | 366 |
| 1480051 | N/A | N/A | 119718 | 119737 | TAACAAGATCCACATACCAT | 81 | 367 |
| 1480056 | N/A | N/A | 166766 | 166785 | TCATTTCATCTCTATCCTAC | 54 | 368 |
| 1480059 | 439 | 458 | 13143 | 13162 | CCTCAGACATTTCTTTGGCT | 15 | 369 |
| 1480085 | N/A | N/A | 80722 | 80741 | CAGATTTTTAAACCAAGCCA | 41 | 370 |
| 1480112 | 3724 | 3743 | 224092 | 224111 | TACTGTCCATAAAATTTTCT | 72 | 371 |
| 1480117 | 2496 | 2515 | 126817 | 126836 | TCTAGAAAATCAAGCCATTC | 28 | 372 |
| 1480118 | N/A | N/A | 116999 | 117018 | TAAGCTTGACATTACCTCCT | 57 | 373 |
| 1480139 | N/A | N/A | 102696 | 102715 | AGATCTATTTCCTAACACAA | 62 | 374 |
| 1480170 | 4392 | 4411 | 224760 | 224779 | GAATGACAAATAATTTCATC | 49 | 375 |
| 1480174 | 550 | 569 | 13254 | 13273 | CAGAACTGCAAATCTCTCCT | 17 | 376 |
| 1480182 | 1861 | 1880 | 109563 | 109582 | AACTTCCGATACAGCATCAA | 24 | 377 |
| 1480194 | N/A | N/A | 3515 | 3534 | ACATCTATACCATCCTAAGA | 58 | 378 |
| 1480195 | N/A | N/A | 202312 | 202331 | TTACCGGATACTTACATCTC | 93 | 379 |
| 1480257 | 3172 | 3191 | 212904 | 212923 | ATCCTCACTGACCAAGAATC | 51 | 380 |
| 1480288 | 741 | 760 | 18178 | 18197 | CTTTTGGACCGTTTGTTAGC | 7 | 381 |
| 1480296 | N/A | N/A | 131270 | 131289 | GCAATTTTATCACTATGCTA | 70 | 382 |
| 1480308 | 3276 | 3295 | 221181 | 221200 | ACATTTAATCCATAACTCCT | 54 | 383 |
| 1480355 | N/A | N/A | 138235 | 138254 | GCTGCTACACATTTTCCACT | 15 | 384 |
| 1480364 | N/A | N/A | 38788 | 38807 | ACCGAACTGATTTCATGATC | 38 | 385 |
| 1480368 | N/A | N/A | 111983 | 112002 | TTCAAACTAATCTTTAGGTA | 82 | 386 |
| 1480378 | N/A | N/A | 70411 | 70430 | GTATATTGATGTAGGTATAT | 18 | 387 |
| 1480379 | N/A | N/A | 13757 | 13776 | TACTTTCTATCTATCAAGCT | 63 | 388 |
| 1480404 | N/A | N/A | 106249 | 106268 | TAGCATCCAAAATATGAGCT | 59 | 389 |
| 1480418 | 2856 | 2875 | 161704 | 161723 | ACAATCCCAATTGTCGCTTC | 44 | 390 |
| 1480432 | 2702 | 2721 | 140811 | 140830 | TATTTGGGACATATTGATCC | 52 | 391 |
| 1480485 | N/A | N/A | 36158 | 36177 | ACCACAGGACATTCTTCCAC | 26 | 392 |
| 1480497 | N/A | N/A | 170355 | 170374 | CCACAATAATATATGAGGGT | 33 | 393 |
| 1480550 | 851 | 870 | 18288 | 18307 | CTGCATCTTCCCCAAAGAAT | 24 | 394 |
| 1480595 | N/A | N/A | 212047 | 212066 | AAGGAGTATATTTCCTTGCC | 69 | 395 |
| 1480599 | N/A | N/A | 164378 | 164397 | TCTGAAATATACTTCCTTCC | 80 | 396 |
| 1480610 | N/A | N/A | 3489 | 3508 | ATCCACCCAAACTGTATTTC | 38 | 397 |
| 1480633 | N/A | N/A | 63218 | 63237 | AGGTACTCAACCTATAAAGT | 56 | 398 |
| 1480647 | 4317 | 4336 | 224685 | 224704 | GACCTTATTCCTTCTGTGCT | 18 | 399 |
| 1480662 | 1279 | 1298 | 26952 | 26971 | CTGGAAACTATCAAACACAA | 11† | 400 |
| 1480683 | N/A | N/A | 201141 | 201160 | ACAGCTTTTCTTTAACTGAT | 55 | 401 |
| 1480697 | 1805 | 1824 | 92577 | 92596 | GGGTCACCCACTTCTTTAAC | 69 | 402 |
| 1480717 | N/A | N/A | 3166 | 3185 | TGCATAACCTTTGCCTATCT | 62 | 403 |
| 1480726 | 3788 | 3807 | 224156 | 224175 | AATTTTTATATCACCCTCCA | 38 | 404 |
| 1480750 | N/A | N/A | 124735 | 124754 | GTACCATTTTCATCTCATGT | 17 | 405 |
| 1480768 | N/A | N/A | 72414 | 72433 | TCATGTTCATATTTTGGTCA | 9 | 406 |
| 1480783 | N/A | N/A | 140698 | 140717 | ATGTTTCAATTTACTAGGCA | 132 | 407 |
| 1480789 | N/A | N/A | 216005 | 216024 | TTGCTTTTATCATTCTGTAC | 23 | 408 |
| 1480817 | 3445 | 3464 | 223813 | 223832 | CATGTTGAACTCCTCTGTCC | 47 | 409 |
| 1480818 | N/A | N/A | 160078 | 160097 | GCACCTAATATATCTCCATT | 40 | 410 |
| 1480836 | N/A | N/A | 3294 | 3313 | ACTCTTCGACCACCAAGGAA | 73 | 411 |
| 1480982 | 2224 | 2243 | 116894 | 116913 | ACCTTGAATTTCATCCTTCC | 14 | 412 |
| 1480985 | N/A | N/A | 63355 | 63374 | AAGTCATCATCTCAGTGAAA | 34 | 413 |
| 1481001 | 2986 | 3005 | 202222 | 202241 | ATCCAAGATAACCAAGGACT | 109 | 414 |
| 1481015 | 1623 | 1642 | 76940 | 76959 | TTGGAGAGCATCTTTTCCAA | 81 | 415 |
| 1481018 | N/A | N/A | 96525 | 96544 | CTGAAGAATCTTCTTGCCTA | 44 | 416 |
| 1481094 | N/A | N/A | 85050 | 85069 | GCATTTCTAAATCCTGCCAA | 40 | 417 |
| 1481100 | N/A | N/A | 92494 | 92513 | ATATCAGTCTAAGAAAGACC | 65 | 418 |
| 1481112 | N/A | N/A | 5765 | 5784 | CCTGTAGTTATTTCATACTA | 60 | 419 |
| 1481154 | N/A | N/A | 19347 | 19366 | CAAGTCTTTACTTCCCATCC | 49 | 420 |
| 1481155 | N/A | N/A | 23213 | 23232 | AGGTACACTTCATCAGATAT | 17 | 421 |
| 1481232 | 351 | 370 | 4444 | 4463 | ACAGGCCCATCATTTTCCAA | 21 | 422 |
| 1481247 | N/A | N/A | 3347 | 3366 | GGGCAGCTTTCTTCTAGTCA | 101 | 423 |
| 1481260 | N/A | N/A | 175850 | 175869 | CCTTCATCATACCTACTACA | 48 | 424 |
| 1481413 | N/A | N/A | 29356 | 29375 | CTCATATTACCATTTCTAGC | 5 | 425 |
| 1481454 | 2026 | 2045 | 115982 | 116001 | TATTGCTTGAAATTCTGACT | 9 | 426 |
| 1481468 | 2590 | 2609 | 135639 | 135658 | TTGCTTAGCGACCTTGGCCA | 100 | 427 |
| 1481490 | 2747 | 2766 | 161595 | 161614 | CGGTAATTATCATTACTCTC | 26 | 428 |
| 1481536 | 1684 | 1703 | 89499 | 89518 | TGTTGTTCCATTAATTGTCA | 15 | 429 |
| 1481544 | N/A | N/A | 221286 | 221305 | CAGCATAATCACTCTGACCT | 100 | 430 |
| 1481570 | N/A | N/A | 20349 | 20368 | AAGCTGACCTTATATCCTTT | 65 | 431 |
| 1481590 | N/A | N/A | 54572 | 54591 | ACACAATCATCCTAACACAT | 23 | 432 |
| 1481592 | 744 | 763 | 18181 | 18200 | ATGCTTTTGGACCGTTTGTT | 2 | 433 |

TABLE 11
Reduction of MSH3 RNA by 5-10-5 MOE gapmers with mixed internucleoside linkages in A431 cells

| | SEQ | SEQ | SEQ | SEQ | | | |
|---|---|---|---|---|---|---|---|
| | ID | ID | ID | ID | | | |
| | NO: 1 | NO: 1 | NO: 2 | NO: 2 | | MSH3 | SEQ |
| Compound | Start | Stop | Start | Stop | | (% | ID |
| Number | Site | Site | Site | Site | Sequence (5′ to 3′) | UTC) | No. |
| 1479842 | N/A | N/A | 170057 | 170076 | CAGGTAATTAATATTAGCAA | 15 | 434 |
| 1479853 | N/A | N/A | 105967 | 105986 | ACCACAAATTTCTCATCACT | 28 | 435 |
| 1479868 | 850 | 869 | 18287 | 18306 | TGCATCTTCCCCAAAGAATC | 28 | 436 |
| 1479873 | N/A | N/A | 92493 | 92512 | TATCAGTCTAAGAAAGACCA | 69 | 437 |
| 1479893 | N/A | N/A | 158693 | 158712 | GACTCAGTATTATAATGCTA | 41 | 438 |
| 1479924 | 1802 | 1821 | 92574 | 92593 | TCACCCACTTCTTTAACTTC | 66 | 439 |
| 1479928 | N/A | N/A | 36153 | 36172 | AGGACATTCTTCCACATGTC | 82 | 440 |
| 1479968 | N/A | N/A | 46648 | 46667 | GCTTTATACACCCTTTCTCT | 7 | 441 |
| 1479985 | N/A | N/A | 63348 | 63367 | CATCTCAGTGAAACTTTCCC | 42 | 442 |
| 1480009 | N/A | N/A | 80433 | 80452 | TTAAGCTATTTCTTTCACTA | 45 | 443 |
| 1480029 | N/A | N/A | 54477 | 54496 | CCTGACATTATATTTGCCTT | 13 | 444 |
| 1480038 | N/A | N/A | 23148 | 23167 | GAACATCTAACATTTGTTCC | 53 | 445 |
| 1480058 | N/A | N/A | 102641 | 102660 | GCCAAGAATTATCTTAGCAT | 57 | 446 |
| 1480091 | 1276 | 1295 | 26949 | 26968 | GAAACTATCAAACACAACCT | 17† | 447 |
| 1480108 | N/A | N/A | 202311 | 202330 | TACCGGATACTTACATCTCT | 59 | 448 |
| 1480134 | 4316 | 4335 | 224684 | 224703 | ACCTTATTCCTTCTGTGCTC | 16 | 449 |
| 1480142 | 688 | 707 | 18125 | 18144 | ACTTGTATTTGATGATCCAA | 3 | 450 |
| 1480186 | N/A | N/A | 215612 | 215631 | ATTCAACATTTATTCCACCC | 22 | 451 |
| 1480226 | 2169 | 2188 | 116839 | 116858 | AATAATTCAGTTTTATCCCC | 19 | 452 |
| 1480254 | 2574 | 2593 | 135623 | 135642 | GCCAGGGAGAAAATGCAGTC | 55 | 453 |
| 1480265 | 1941 | 1960 | 109643 | 109662 | CTACAGAGTCCCCTCTCTAT | 39 | 40 |
| 1480272 | N/A | N/A | 76019 | 76038 | CAGCACACAGACTACTTGCT | 71 | 454 |
| 1480275 | N/A | N/A | 3165 | 3184 | GCATAACCTTTGCCTATCTC | 46 | 455 |
| 1480276 | N/A | N/A | 140697 | 140716 | TGTTTCAATTTACTAGGCAT | 78 | 456 |
| 1480292 | N/A | N/A | 63217 | 63236 | GGTACTCAACCTATAAAGTA | 35 | 457 |
| 1480323 | N/A | N/A | 211049 | 211068 | ACCCACTAGATTTCTTCACT | 47 | 458 |
| 1480336 | 3444 | 3463 | 223812 | 223831 | ATGTTGAACTCCTCTGTCCA | 42 | 459 |
| 1480338 | 1056 | 1075 | 20807 | 20826 | GCAGTCAATTTCCGGGAAAA | 1 | 460 |
| 1480405 | N/A | N/A | 130822 | 130841 | CTGGTATTCAATCCTCTGAT | 17 | 461 |
| 1480408 | N/A | N/A | 122591 | 122610 | TGTGATTACATACTACAGCT | 13 | 462 |
| 1480443 | N/A | N/A | 13709 | 13728 | TGCCCATCATGATTTTCCAC | 30 | 463 |
| 1480447 | 2701 | 2720 | 140810 | 140829 | ATTTGGGACATATTGATCCT | 85 | 464 |
| 1480462 | 2025 | 2044 | 115981 | 116000 | ATTGCTTGAAATTCTGACTT | 9 | 465 |
| 1480516 | N/A | N/A | 3514 | 3533 | CATCTATACCATCCTAAGAA | 86 | 466 |
| 1480525 | N/A | N/A | 221285 | 221304 | AGCATAATCACTCTGACCTT | 65 | 467 |
| 1480526 | N/A | N/A | 70282 | 70301 | TGCAGAACACTTTCTTGGTC | 16 | 468 |
| 1480577 | N/A | N/A | 29355 | 29374 | TCATATTACCATTTCTAGCA | 3 | 469 |
| 1480586 | N/A | N/A | 72373 | 72392 | TGCTCATTATATATTACTAC | 49 | 470 |
| 1480612 | N/A | N/A | 116997 | 117016 | AGCTTGACATTACCTCCTGT | 56 | 471 |
| 1480620 | N/A | N/A | 142986 | 143005 | GCTTAACATTTCCTTCATAC | 20 | 472 |
| 1480641 | 1620 | 1639 | 76937 | 76956 | GAGAGCATCTTTTCCAAGTT | 30 | 473 |
| 1480648 | 3275 | 3294 | 221180 | 221199 | CATTTAATCCATAACTCCTT | 76 | 474 |
| 1480784 | 548 | 567 | 13252 | 13271 | GAACTGCAAATCTCTCCTGC | 12 | 475 |
| 1480787 | N/A | N/A | 164218 | 164237 | GCAGTTTCACATTTCTGTAT | 46 | 476 |
| 1480865 | 3171 | 3190 | 212903 | 212922 | TCCTCACTGACCAAGAATCC | 53 | 477 |
| 1480880 | 350 | 369 | 4443 | 4462 | CAGGCCCATCATTTTCCAAT | 18 | 478 |
| 1480931 | 2849 | 2868 | 161697 | 161716 | CAATTGTCGCTTCTTCTGCA | 46 | 479 |
| 1480933 | 1125 | 1144 | 23000 | 23019 | TTTACAGCATCATCCAGCTT | 31 | 480 |
| 1480942 | 1683 | 1702 | 89498 | 89517 | GTTGTTCCATTAATTGTCAT | 7 | 481 |
| 1480966 | 2746 | 2765 | 161594 | 161613 | GGTAATTATCATTACTCTCT | 20 | 482 |
| 1481019 | N/A | N/A | 96095 | 96114 | CGTCATCCATTATTTGTTCT | 68 | 483 |
| 1481067 | N/A | N/A | 166761 | 166780 | TCATCTCTATCCTACCAAAT | 28 | 484 |
| 1481166 | N/A | N/A | 3292 | 3311 | TCTTCGACCACCAAGGAAAA | 107 | 485 |
| 1481185 | 3787 | 3806 | 224155 | 224174 | ATTTTTATATCACCCTCCAA | 38 | 486 |
| 1481189 | N/A | N/A | 13141 | 13160 | TCAGACATTTCTTTGGCTCT | 8 | 487 |
| 1481230 | N/A | N/A | 119716 | 119735 | ACAAGATCCACATACCATCA | 24 | 488 |
| 1481238 | 2929 | 2948 | 202165 | 202184 | CAGTTCTTCCATAAATGTAC | 38 | 489 |
| 1481265 | N/A | N/A | 3345 | 3364 | GCAGCTTTCTTCTAGTCACC | 33 | 490 |
| 1481286 | N/A | N/A | 5762 | 5781 | GTAGTTATTTCATACTAACA | 31 | 491 |
| 1481289 | N/A | N/A | 182170 | 182189 | GCCAACACATTTTCTATTAC | 54 | 492 |
| 1481308 | N/A | N/A | 124694 | 124713 | GTACTAATAAATATTCCACA | 23 | 493 |
| 1481325 | N/A | N/A | 38787 | 38806 | CCGAACTGATTTCATGATCT | 11 | 494 |
| 1481334 | N/A | N/A | 20348 | 20367 | AGCTGACCTTATATCCTTTT | 59 | 495 |
| 1481338 | 1858 | 1877 | 109560 | 109579 | TTCCGATACAGCATCAAGCC | 43 | 496 |
| 1481351 | 2492 | 2511 | 126813 | 126832 | GAAAATCAAGCCATTCAGCA | 45 | 497 |
| 1481352 | 4388 | 4407 | 224756 | 224775 | GACAAATAATTTCATCCAAC | 18 | 498 |
| 1481388 | 3695 | 3714 | 224063 | 224082 | GTGGAAGTCTATTCAAGAGT | 27 | 499 |
| 1481389 | N/A | N/A | 84421 | 84440 | ATGTATTACATTTATTCGCT | 7 | 500 |
| 1481392 | N/A | N/A | 186394 | 186413 | AGATCTTTATCCCTATGTAC | 51 | 501 |
| 1481438 | N/A | N/A | 200922 | 200941 | CTGGTAACTACTTTCTCAGC | 90 | 502 |
| 1481440 | N/A | N/A | 138232 | 138251 | GCTACACATTTTCCACTGTT | 18 | 503 |
| 1481451 | N/A | N/A | 3488 | 3507 | TCCACCCAAACTGTATTTCA | 50 | 504 |
| 1481507 | N/A | N/A | 19316 | 19335 | ACATGCTACCTCATCACTCT | 95 | 505 |
| 1481529 | 1443 | 1462 | 73475 | 73494 | ATGTTATCCATCCTTTCGAC | 14 | 506 |
| 1481531 | N/A | N/A | 111537 | 111556 | ATATGCATCAATTTTCAGGC | 8 | 507 |
| 1481592 | 744 | 763 | 18181 | 18200 | ATGCTTTTGGACCGTTTGTT | 2 | 433 |
| 1481630 | N/A | N/A | 175591 | 175610 | ACAACTTACTCATTTAGTGC | 19 | 508 |
| 1481632 | N/A | N/A | 148080 | 148099 | AGCATCAATCAATAAGATCT | 80 | 509 |

TABLE 12
Reduction of MSH3 RNA by 5-10-5 MOE gapmers with mixed internucleoside linkages in A431 cells

| | SEQ | SEQ | SEQ | SEQ | | | |
|---|---|---|---|---|---|---|---|
| | ID | ID | ID | ID | | | |
| | NO: 1 | NO: 1 | NO: 2 | NO: 2 | | MSH3 | SEQ |
| Compound | Start | Stop | Start | Stop | | (% | ID |
| Number | Site | Site | Site | Site | Sequence (5′ to 3′) | UTC) | No. |
| 1479900 | N/A | N/A | 211048 | 211067 | CCCACTAGATTTCTTCACTA | 54 | 510 |
| 1479925 | N/A | N/A | 37565 | 37584 | TCTCAAATTTTGCTTGGACT | 3 | 511 |
| 1479955 | 2928 | 2947 | 202164 | 202183 | AGTTCTTCCATAAATGTACT | 115 | 512 |
| 1480005 | N/A | N/A | 215611 | 215630 | TTCAACATTTATTCCACCCC | 49 | 513 |
| 1480033 | 1054 | 1073 | 20805 | 20824 | AGTCAATTTCCGGGAAAAGA | 3 | 514 |
| 1480067 | N/A | N/A | 36106 | 36125 | GCTAGTTTTTAACCAAGTAT | 28 | 515 |
| 1480071 | N/A | N/A | 200921 | 200940 | TGGTAACTACTTTCTCAGCA | 34 | 516 |
| 1480079 | N/A | N/A | 70281 | 70300 | GCAGAACACTTTCTTGGTCT | 7 | 517 |
| 1480081 | N/A | N/A | 118594 | 118613 | TGGGTAACTTATCTAACTAC | 28 | 518 |
| 1480083 | N/A | N/A | 3253 | 3272 | AAAGACGCACCCCTTGCCCA | 143 | 519 |
| 1480104 | 3782 | 3801 | 224150 | 224169 | TATATCACCCTCCAAAAGCT | 76 | 520 |
| 1480119 | N/A | N/A | 23128 | 23147 | TCACCTGCAAAGTACTTACC | 131† | 521 |
| 1480136 | N/A | N/A | 3485 | 3504 | ACCCAAACTGTATTTCAGAC | 53 | 522 |
| 1480167 | 2491 | 2510 | 126812 | 126831 | AAAATCAAGCCATTCAGCAC | 103 | 21 |
| 1480178 | N/A | N/A | 3344 | 3363 | CAGCTTTCTTCTAGTCACCC | 61 | 523 |
| 1480188 | N/A | N/A | 202309 | 202328 | CCGGATACTTACATCTCTGA | 64 | 524 |
| 1480193 | N/A | N/A | 138201 | 138220 | TTGCATCCAAATTCTTACTT | 62 | 525 |
| 1480196 | 1800 | 1819 | 92572 | 92591 | ACCCACTTCTTTAACTTCCG | 8 | 526 |
| 1480209 | 2165 | 2184 | 116835 | 116854 | ATTCAGTTTTATCCCCAACT | 14 | 527 |
| 1480228 | 1990 | 2009 | 115946 | 115965 | TTTGACAATCAAGAAGAACT | 31 | 528 |
| 1480260 | N/A | N/A | 142696 | 142715 | TGGACAACTTTTTCCCAAAC | 53 | 529 |
| 1480283 | 1938 | 1957 | 109640 | 109659 | CAGAGTCCCCTCTCTATGTC | 42 | 530 |
| 1480353 | N/A | N/A | 164184 | 164203 | AATGCTGATTTTCTCCACTA | 26 | 531 |
| 1480354 | 1618 | 1637 | 76935 | 76954 | GAGCATCTTTTCCAAGTTGA | 33 | 532 |
| 1480360 | N/A | N/A | 79806 | 79825 | GCAACTGAATTTTTCATCTA | 24 | 533 |
| 1480398 | N/A | N/A | 105946 | 105965 | CGGTTAGGTATAATTCCATC | 11 | 534 |
| 1480403 | 3443 | 3462 | 223811 | 223830 | TGTTGAACTCCTCTGTCCAC | 40 | 535 |
| 1480415 | N/A | N/A | 148079 | 148098 | GCATCAATCAATAAGATCTT | 90 | 536 |
| 1480515 | N/A | N/A | 175467 | 175486 | AGTACAAATACTCCACAGTC | 45 | 537 |
| 1480560 | N/A | N/A | 140442 | 140461 | GTTTACCTTTACAAGATCTT | 49 | 538 |
| 1480570 | 3644 | 3663 | 224012 | 224031 | ACTTGAAAAAGACTGTCTTC | 81 | 539 |
| 1480588 | N/A | N/A | 72372 | 72391 | GCTCATTATATATTACTACA | 55 | 540 |
| 1480645 | 546 | 565 | 13250 | 13269 | ACTGCAAATCTCTCCTGCAG | 98 | 541 |
| 1480663 | 1123 | 1142 | 22998 | 23017 | TACAGCATCATCCAGCTTGA | 13 | 542 |
| 1480709 | N/A | N/A | 124658 | 124677 | GCTGTATATACTTCCCTAAT | 14 | 543 |
| 1480727 | N/A | N/A | 95119 | 95138 | GCATCCCTTACACTGTTGTC | 54 | 544 |
| 1480734 | N/A | N/A | 63215 | 63234 | TACTCAACCTATAAAGTAGT | 68 | 545 |
| 1480811 | 1854 | 1873 | 109556 | 109575 | GATACAGCATCAAGCCGGGC | 47 | 546 |
| 1480819 | 3170 | 3189 | 212902 | 212921 | CCTCACTGACCAAGAATCCC | 69 | 547 |
| 1480895 | 4384 | 4403 | 224752 | 224771 | AATAATTTCATCCAACAATC | 84 | 548 |
| 1480896 | 2697 | 2716 | 140806 | 140825 | GGGACATATTGATCCTGTTC | 59 | 549 |
| 1480901 | 2745 | 2764 | 161593 | 161612 | GTAATTATCATTACTCTCTC | 40 | 550 |
| 1480908 | N/A | N/A | 116996 | 117015 | GCTTGACATTACCTCCTGTC | 84 | 551 |
| 1480913 | 3937 | 3956 | 224305 | 224324 | GGCCAATTCTTTCTACTTAT | 144 | 552 |
| 1480932 | 438 | 457 | 13142 | 13161 | CTCAGACATTTCTTTGGCTC | 6 | 553 |
| 1480947 | N/A | N/A | 181922 | 181941 | ATAACATCTTATACCTGGCT | 38 | 554 |
| 1481031 | N/A | N/A | 75985 | 76004 | CCAAGCACTCTCCTACTTAA | 44 | 555 |
| 1481035 | N/A | N/A | 13706 | 13725 | CCATCATGATTTTCCACGGT | 11 | 556 |
| 1481046 | N/A | N/A | 29042 | 29061 | TTGATATTACCATTTCTAGC | 2 | 557 |
| 1481051 | N/A | N/A | 122590 | 122609 | GTGATTACATACTACAGCTT | 18 | 558 |
| 1481138 | N/A | N/A | 63347 | 63366 | ATCTCAGTGAAACTTTCCCC | 25 | 559 |
| 1481144 | 1442 | 1461 | 73474 | 73493 | TGTTATCCATCCTTTCGACT | 18 | 560 |
| 1481147 | N/A | N/A | 3164 | 3183 | CATAACCTTTGCCTATCTCC | 59 | 561 |
| 1481161 | 1676 | 1695 | 89491 | 89510 | CATTAATTGTCATAAATTCC | 20 | 562 |
| 1481201 | N/A | N/A | 54259 | 54278 | CCACAAGTTCATTAACAAGC | 8 | 563 |
| 1481203 | N/A | N/A | 169791 | 169810 | GGAGAATTAACTTATCCCTC | 84 | 564 |
| 1481214 | N/A | N/A | 158649 | 158668 | GCACAATGACATACATATCT | 44 | 565 |
| 1481236 | N/A | N/A | 186393 | 186412 | GATCTTTATCCCTATGTACA | 59 | 566 |
| 1481237 | N/A | N/A | 221284 | 221303 | GCATAATCACTCTGACCTTT | 60 | 567 |
| 1481241 | N/A | N/A | 130680 | 130699 | CTCTAGCTAAATTTCAGCCA | 62 | 568 |
| 1481259 | N/A | N/A | 20347 | 20366 | GCTGACCTTATATCCTTTTG | 27 | 569 |
| 1481278 | N/A | N/A | 46517 | 46536 | TGGCATTCATTCTTCCAGTC | 31 | 570 |
| 1481315 | 849 | 868 | 18286 | 18305 | GCATCTTCCCCAAAGAATCT | 41 | 571 |
| 1481320 | 2846 | 2865 | 161694 | 161713 | TTGTCGCTTCTTCTGCAGGA | 26 | 572 |
| 1481329 | N/A | N/A | 111535 | 111554 | ATGCATCAATTTTCAGGCTC | 39 | 573 |
| 1481342 | 3273 | 3292 | 221178 | 221197 | TTTAATCCATAACTCCTTGC | 105 | 574 |
| 1481373 | N/A | N/A | 92407 | 92426 | AATGTCATATATACCTAGCA | 53 | 575 |
| 1481376 | N/A | N/A | 19274 | 19293 | CCCAAACTATAGAATCATCA | 55 | 576 |
| 1481402 | 686 | 705 | 18123 | 18142 | TTGTATTTGATGATCCAAAC | 9 | 577 |
| 1481455 | N/A | N/A | 102575 | 102594 | AAGGTATTACTCATTTGCTC | 23 | 578 |
| 1481460 | N/A | N/A | 3513 | 3532 | ATCTATACCATCCTAAGAAA | 92 | 579 |
| 1481524 | N/A | N/A | 12938 | 12957 | AGATGCAATTTCACTCATTC | 44 | 580 |
| 1481526 | 2563 | 2582 | 135612 | 135631 | AATGCAGTCAACAGTTGCTA | 91 | 581 |
| 1481592 | 744 | 763 | 18181 | 18200 | ATGCTTTTGGACCGTTTGTT | 2 | 433 |
| 1481596 | N/A | N/A | 166750 | 166769 | CTACCAAATTTCCCTATCCA | 87 | 582 |
| 1481601 | 347 | 366 | 4440 | 4459 | GCCCATCATTTTCCAATGGT | 67 | 583 |
| 1481628 | 1275 | 1294 | 26948 | 26967 | AAACTATCAAACACAACCTC | 43† | 584 |
| 1481649 | N/A | N/A | 84346 | 84365 | TCTGTCTTAAATCCTATCAC | 72 | 585 |

TABLE 13
Reduction of MSH3 RNA by 5-10-5 MOE gapmers with mixed internucleoside linkages in A431 cells

| | SEQ | SEQ | SEQ | SEQ | | | |
|---|---|---|---|---|---|---|---|
| | ID | ID | ID | ID | | | |
| | NO: 1 | NO: 1 | NO: 2 | NO: 2 | | MSH3 | SEQ |
| Compound | Start | Stop | Start | Stop | | (% | ID |
| Number | Site | Site | Site | Site | Sequence (5′ to 3′) | UTC) | No. |
| 1479822 | N/A | N/A | 181921 | 181940 | TAACATCTTATACCTGGCTT | 47 | 586 |
| 1479910 | N/A | N/A | 92406 | 92425 | ATGTCATATATACCTAGCAC | 25 | 587 |
| 1479936 | 545 | 564 | 13249 | 13268 | CTGCAAATCTCTCCTGCAGA | 57 | 588 |
| 1479951 | 3355 | 3374 | 221260 | 221279 | ATTTATTAATCCTTCCAGCT | 42 | 589 |
| 1479961 | N/A | N/A | 215610 | 215629 | TCAACATTTATTCCACCCCT | 47 | 590 |
| 1479980 | N/A | N/A | 147867 | 147886 | AGTTCTTACAACAATGTCAC | 41 | 591 |
| 1479986 | N/A | N/A | 122242 | 122261 | GTGAGATAATATCTCCTGTC | 40 | 592 |
| 1479994 | 2542 | 2561 | 135591 | 135610 | GTGATGCACTGCTTTACACA | 39 | 593 |
| 1480031 | N/A | N/A | 3163 | 3182 | ATAACCTTTGCCTATCTCCT | 94 | 594 |
| 1480036 | N/A | N/A | 13705 | 13724 | CATCATGATTTTCCACGGTA | 37 | 595 |
| 1480049 | N/A | N/A | 118413 | 118432 | AGCATAGCACTTTATGATTA | 12 | 596 |
| 1480080 | N/A | N/A | 116995 | 117014 | CTTGACATTACCTCCTGTCC | 75 | 597 |
| 1480110 | N/A | N/A | 202308 | 202327 | CGGATACTTACATCTCTGAT | 94 | 598 |
| 1480172 | 1273 | 1292 | 26946 | 26965 | ACTATCAAACACAACCTCGC | 10† | 599 |
| 1480206 | N/A | N/A | 79677 | 79696 | CCACTCATGAACACCACATT | 29 | 600 |
| 1480277 | 3441 | 3460 | 223809 | 223828 | TTGAACTCCTCTGTCCACTT | 46 | 601 |
| 1480278 | N/A | N/A | 63346 | 63365 | TCTCAGTGAAACTTTCCCCG | 64 | 602 |
| 1480295 | 346 | 365 | 4439 | 4458 | CCCATCATTTTCCAATGGTC | 36 | 603 |
| 1480302 | N/A | N/A | 175466 | 175485 | GTACAAATACTCCACAGTCA | 19 | 604 |
| 1480306 | 1852 | 1871 | 109554 | 109573 | TACAGCATCAAGCCGGGCAT | 27 | 605 |
| 1480328 | N/A | N/A | 138165 | 138184 | TGAACAATCCTATACACATC | 73 | 606 |
| 1480345 | 2844 | 2863 | 161692 | 161711 | GTCGCTTCTTCTGCAGGAAC | 26 | 607 |
| 1480352 | N/A | N/A | 75930 | 75949 | ACTGTTCCTTCATATGTCTA | 50 | 608 |
| 1480369 | N/A | N/A | 36000 | 36019 | GACAAATTATAACTACACAT | 20 | 609 |
| 1480448 | N/A | N/A | 3484 | 3503 | CCCAAACTGTATTTCAGACT | 41 | 610 |
| 1480467 | 684 | 703 | 18121 | 18140 | GTATTTGATGATCCAAACTG | 6 | 611 |
| 1480500 | N/A | N/A | 140055 | 140074 | ACCTAAAATTTTCATACGCT | 23 | 612 |
| 1480507 | N/A | N/A | 186127 | 186146 | TTGCTTTGAACCATCAGACT | 55 | 613 |
| 1480536 | N/A | N/A | 37553 | 37572 | CTTGGACTTTATTCCTGTTA | 2 | 614 |
| 1480650 | N/A | N/A | 94996 | 95015 | TCATCAGTTTCCCATGTCTT | 27 | 615 |
| 1480670 | N/A | N/A | 164183 | 164202 | ATGCTGATTTTCTCCACTAC | 27 | 616 |
| 1480700 | 2927 | 2946 | 202163 | 202182 | GTTCTTCCATAAATGTACTC | 45 | 617 |
| 1480762 | 848 | 867 | 18285 | 18304 | CATCTTCCCCAAAGAATCTA | 82 | 618 |
| 1480770 | 1799 | 1818 | 92571 | 92590 | CCCACTTCTTTAACTTCCGT | 10 | 619 |
| 1480781 | N/A | N/A | 123750 | 123769 | TTTAAACCTACCTTCCAACC | 112 | 620 |
| 1480854 | N/A | N/A | 23126 | 23145 | ACCTGCAAAGTACTTACCAC | 794 | 621 |
| 1480855 | 1989 | 2008 | 115945 | 115964 | TTGACAATCAAGAAGAACTC | 37 | 622 |
| 1480875 | N/A | N/A | 69644 | 69663 | TGTACTACACTATAACTGCA | 95 | 623 |
| 1480885 | 1122 | 1141 | 22997 | 23016 | ACAGCATCATCCAGCTTGAT | 16 | 624 |
| 1480915 | 4380 | 4399 | 224748 | 224767 | ATTTCATCCAACAATCTTTA | 45 | 625 |
| 1480922 | 3781 | 3800 | 224149 | 224168 | ATATCACCCTCCAAAAGCTT | 44 | 626 |
| 1480923 | 1907 | 1926 | 109609 | 109628 | GTAGATGATTTTCTATCTGA | 14 | 627 |
| 1480936 | N/A | N/A | 102464 | 102483 | AGTAGATTATACCTTGACCA | 16 | 628 |
| 1480946 | N/A | N/A | 3512 | 3531 | TCTATACCATCCTAAGAAAC | 86 | 629 |
| 1480961 | N/A | N/A | 200854 | 200873 | ACACATACTTCACATTTGAC | 64 | 630 |
| 1480979 | N/A | N/A | 20346 | 20365 | CTGACCTTATATCCTTTTGC | 14 | 631 |
| 1480992 | N/A | N/A | 105942 | 105961 | TAGGTATAATTCCATCTTCA | 34 | 632 |
| 1481032 | N/A | N/A | 45728 | 45747 | CATCTATATTTCTCTACATC | 25 | 633 |
| 1481037 | 3270 | 3289 | 221175 | 221194 | AATCCATAACTCCTTGCTGC | 28 | 634 |
| 1481045 | N/A | N/A | 211047 | 211066 | CCACTAGATTTCTTCACTAT | 56 | 635 |
| 1481069 | 1673 | 1692 | 89488 | 89507 | TAATTGTCATAAATTCCATT | 16 | 636 |
| 1481105 | 2490 | 2509 | 126811 | 126830 | AAATCAAGCCATTCAGCACT | 61 | 637 |
| 1481132 | N/A | N/A | 111355 | 111374 | CCAACTCATATATCTTTCTC | 23 | 638 |
| 1481162 | 2742 | 2761 | 161590 | 161609 | ATTATCATTACTCTCTCTGA | 30 | 639 |
| 1481204 | N/A | N/A | 166749 | 166768 | TACCAAATTTCCCTATCCAT | 105 | 640 |
| 1481239 | N/A | N/A | 3252 | 3271 | AAGACGCACCCCTTGCCCAC | 118 | 641 |
| 1481267 | N/A | N/A | 116834 | 116853 | TTCAGTTTTATCCCCAACTC | 14 | 642 |
| 1481303 | N/A | N/A | 72261 | 72280 | GCTACAACTCCTTCTTTTTA | 74 | 643 |
| 1481327 | 1617 | 1636 | 76934 | 76953 | AGCATCTTTTCCAAGTTGAA | 46 | 644 |
| 1481377 | N/A | N/A | 53557 | 53576 | GGCAAACTAATACATTCCAC | 21 | 645 |
| 1481390 | 3936 | 3955 | 224304 | 224323 | GCCAATTCTTTCTACTTATA | 45 | 646 |
| 1481409 | 1026 | 1045 | 20777 | 20796 | CTGTTGTCTCCAATGGCCTT | 31 | 647 |
| 1481416 | N/A | N/A | 19255 | 19274 | ACAAGCATTCATGACTTCCA | 26 | 648 |
| 1481424 | N/A | N/A | 3342 | 3361 | GCTTTCTTCTAGTCACCCAA | 32 | 649 |
| 1481433 | 1441 | 1460 | 73473 | 73492 | GTTATCCATCCTTTCGACTC | 15 | 650 |
| 1481462 | N/A | N/A | 63213 | 63232 | CTCAACCTATAAAGTAGTGC | 23 | 651 |
| 1481482 | N/A | N/A | 12937 | 12956 | GATGCAATTTCACTCATTCC | 15 | 652 |
| 1481486 | N/A | N/A | 29001 | 29020 | ACATTCATACCTTCTGATCC | 50 | 653 |
| 1481519 | 3169 | 3188 | 212901 | 212920 | CTCACTGACCAAGAATCCCA | 66 | 654 |
| 1481527 | 3633 | 3652 | 224001 | 224020 | ACTGTCTTCAGAAAAACCTC | 66 | 655 |
| 1481534 | N/A | N/A | 4530 | 4549 | GAATCCCCCACAACTCACCA | 110 | 656 |
| 1481538 | 2694 | 2713 | 140803 | 140822 | ACATATTGATCCTGTTCTCC | 53 | 657 |
| 1481562 | N/A | N/A | 169656 | 169675 | GTGCTTCTATAAACATGACC | 25 | 658 |
| 1481569 | N/A | N/A | 130664 | 130683 | GCCAATATTCTTTTTCTGGA | 17 | 659 |
| 1481573 | N/A | N/A | 142693 | 142712 | ACAACTTTTTCCCAAACTCT | 47 | 660 |
| 1481592 | 744 | 763 | 18181 | 18200 | ATGCTTTTGGACCGTTTGTT | 2 | 433 |
| 1481613 | N/A | N/A | 158644 | 158663 | ATGACATACATATCTAACCA | 65 | 661 |
| 1481635 | N/A | N/A | 84345 | 84364 | CTGTCTTAAATCCTATCACC | 70 | 662 |

TABLE 14
Reduction of MSH3 RNA by 5-10-5 MOE gapmers with mixed internucleoside linkages in A431 cells

| | SEQ | SEQ | SEQ | SEQ | | | |
|---|---|---|---|---|---|---|---|
| | ID | ID | ID | ID | | | |
| | NO: 1 | NO: 1 | NO: 2 | NO: 2 | | MSH3 | SEQ |
| Compound | Start | Stop | Start | Stop | | (% | ID |
| Number | Site | Site | Site | Site | Sequence (5′ to 3′) | UTC) | No. |
| 1479804 | N/A | N/A | 116994 | 117013 | TTGACATTACCTCCTGTCCT | 90 | 663 |
| 1479860 | 3269 | 3288 | 221174 | 221193 | ATCCATAACTCCTTGCTGCA | 44 | 664 |
| 1479883 | N/A | N/A | 123749 | 123768 | TTAAACCTACCTTCCAACCT | 65 | 665 |
| 1479886 | N/A | N/A | 175384 | 175403 | TGTCTATTATCTTCCAATTC | 102 | 666 |
| 1479952 | N/A | N/A | 118339 | 118358 | GAGGTAACTCTTCCATGGTC | 14 | 667 |
| 1479960 | N/A | N/A | 3250 | 3269 | GACGCACCCCTTGCCCACAA | 96 | 668 |
| 1479979 | N/A | N/A | 69641 | 69660 | ACTACACTATAACTGCATCT | 46 | 669 |
| 1480002 | 4377 | 4396 | 224745 | 224764 | TCATCCAACAATCTTTAAAC | 27 | 670 |
| 1480028 | N/A | N/A | 101139 | 101158 | GTCTCATTTTCACCTGATTA | 29 | 671 |
| 1480035 | N/A | N/A | 200853 | 200872 | CACATACTTCACATTTGACC | 40 | 672 |
| 1480060 | 1437 | 1456 | 73469 | 73488 | TCCATCCTTTCGACTCGAAT | 9 | 673 |
| 1480066 | N/A | N/A | 84344 | 84363 | TGTCTTAAATCCTATCACCT | 53 | 674 |
| 1480086 | 2690 | 2709 | 140799 | 140818 | ATTGATCCTGTTCTCCCAGC | 15 | 675 |
| 1480094 | 2924 | 2943 | 202160 | 202179 | CTTCCATAAATGTACTCTGT | 50 | 676 |
| 1480101 | 2740 | 2759 | 161588 | 161607 | TATCATTACTCTCTCTGAGT | 60 | 677 |
| 1480124 | N/A | N/A | 12936 | 12955 | ATGCAATTTCACTCATTCCT | 13 | 678 |
| 1480127 | N/A | N/A | 45614 | 45633 | ACATTGCCTTTACAATTGCT | 9 | 679 |
| 1480128 | N/A | N/A | 53361 | 53380 | ACAGTCAATTCTTACAAGCA | 18 | 680 |
| 1480138 | 1272 | 1291 | 26945 | 26964 | CTATCAAACACAACCTCGCC | 12† | 681 |
| 1480145 | 3861 | 3880 | 224229 | 224248 | TCAATGGATAGATTCCTGCC | 31 | 682 |
| 1480162 | N/A | N/A | 35954 | 35973 | AGCTCTTTAATTCCTCCCCT | 18 | 683 |
| 1480181 | N/A | N/A | 4528 | 4547 | ATCCCCCACAACTCACCAGA | 82 | 684 |
| 1480221 | N/A | N/A | 115926 | 115945 | CTTGGGTAGAACACTGAAAA | 54 | 685 |
| 1480449 | 2538 | 2557 | 135587 | 135606 | TGCACTGCTTTACACAAGGA | 9 | 686 |
| 1480486 | N/A | N/A | 215609 | 215628 | CAACATTTATTCCACCCCTA | 33 | 687 |
| 1480489 | 682 | 701 | 18119 | 18138 | ATTTGATGATCCAAACTGAC | 12 | 688 |
| 1480528 | N/A | N/A | 211037 | 211056 | TCTTCACTATACCTTTTCCC | 29 | 689 |
| 1480551 | N/A | N/A | 37552 | 37571 | TTGGACTTTATTCCTGTTAA | 2 | 690 |
| 1480555 | N/A | N/A | 3162 | 3181 | TAACCTTTGCCTATCTCCTC | 62 | 691 |
| 1480559 | 1843 | 1862 | 109545 | 109564 | AAGCCGGGCATTTATTTCCC | 37 | 692 |
| 1480576 | N/A | N/A | 130313 | 130332 | ATGCTACCATCCTTTTCATT | 32 | 693 |
| 1480587 | 1798 | 1817 | 92570 | 92589 | CCACTTCTTTAACTTCCGTC | 8 | 694 |
| 1480592 | 536 | 555 | 13240 | 13259 | TCTCCTGCAGAGATTCTGTC | 110 | 42 |
| 1480615 | N/A | N/A | 169655 | 169674 | TGCTTCTATAAACATGACCT | 36 | 695 |
| 1480643 | N/A | N/A | 13404 | 13423 | ACAGTACTTCAGAACCCACT | 53 | 696 |
| 1480651 | N/A | N/A | 163587 | 163606 | GCAGCAGCAATCTTACAACT | 27 | 697 |
| 1480657 | N/A | N/A | 105641 | 105660 | TTGATCTTACTATACAACTT | 37 | 698 |
| 1480706 | N/A | N/A | 122142 | 122161 | AGTGAAGTTCTATCACACCA | 15 | 699 |
| 1480718 | N/A | N/A | 116833 | 116852 | TCAGTTTTATCCCCAACTCT | 27 | 700 |
| 1480747 | 1906 | 1925 | 109608 | 109627 | TAGATGATTTTCTATCTGAC | 21 | 701 |
| 1480804 | N/A | N/A | 3476 | 3495 | GTATTTCAGACTTTATAATC | 61 | 702 |
| 1480812 | 3439 | 3458 | 223807 | 223826 | GAACTCCTCTGTCCACTTCT | 40 | 703 |
| 1480927 | N/A | N/A | 158256 | 158275 | GCAGAATACTAAGATAAGCT | 37 | 704 |
| 1480969 | 3780 | 3799 | 224148 | 224167 | TATCACCCTCCAAAAGCTTG | 39 | 705 |
| 1481004 | 345 | 364 | 4438 | 4457 | CCATCATTTTCCAATGGTCT | 8 | 706 |
| 1481026 | 1120 | 1139 | 22995 | 23014 | AGCATCATCCAGCTTGATTA | 13 | 707 |
| 1481038 | N/A | N/A | 29000 | 29019 | CATTCATACCTTCTGATCCA | 25 | 708 |
| 1481041 | N/A | N/A | 186120 | 186139 | GAACCATCAGACTATGGCAA | 85 | 709 |
| 1481060 | N/A | N/A | 72092 | 72111 | CCTGCACATATCCCTCACTA | 75 | 710 |
| 1481086 | N/A | N/A | 181920 | 181939 | AACATCTTATACCTGGCTTT | 46 | 711 |
| 1481124 | N/A | N/A | 111354 | 111373 | CAACTCATATATCTTTCTCC | 26 | 712 |
| 1481125 | 3168 | 3187 | 212900 | 212919 | TCACTGACCAAGAATCCCAT | 45 | 713 |
| 1481127 | N/A | N/A | 3340 | 3359 | TTTCTTCTAGTCACCCAATC | 88 | 714 |
| 1481137 | N/A | N/A | 63024 | 63043 | TCCAAAGGCTTTATCTGTTC | 4 | 715 |
| 1481141 | N/A | N/A | 138161 | 138180 | CAATCCTATACACATCTCCA | 32 | 716 |
| 1481152 | N/A | N/A | 20345 | 20364 | TGACCTTATATCCTTTTGCC | 7 | 717 |
| 1481157 | 3354 | 3373 | 221259 | 221278 | TTTATTAATCCTTCCAGCTC | 60 | 718 |
| 1481171 | N/A | N/A | 147789 | 147808 | GCTAAATATCTTTCCCAGCA | 51 | 719 |
| 1481199 | 2487 | 2506 | 126808 | 126827 | TCAAGCCATTCAGCACTGCA | 34 | 720 |
| 1481209 | N/A | N/A | 79676 | 79695 | CACTCATGAACACCACATTT | 46 | 721 |
| 1481219 | N/A | N/A | 92405 | 92424 | TGTCATATATACCTAGCACA | 41 | 722 |
| 1481240 | N/A | N/A | 94921 | 94940 | TTGGTAATTATCATCATCCA | 26 | 723 |
| 1481275 | N/A | N/A | 19253 | 19272 | AAGCATTCATGACTTCCAAC | 13 | 724 |
| 1481282 | 2835 | 2854 | 161683 | 161702 | TCTGCAGGAACATAGGAGCC | 62 | 725 |
| 1481285 | N/A | N/A | 75922 | 75941 | TTCATATGTCTATATGGCTC | 45 | 726 |
| 1481301 | N/A | N/A | 202306 | 202325 | GATACTTACATCTCTGATGA | 86 | 727 |
| 1481331 | 1616 | 1635 | 76933 | 76952 | GCATCTTTTCCAAGTTGAAT | 24 | 728 |
| 1481332 | N/A | N/A | 3511 | 3530 | CTATACCATCCTAAGAAACT | 72 | 729 |
| 1481361 | N/A | N/A | 141811 | 141830 | CTTCACTATTTTTACCCAGC | 24 | 730 |
| 1481363 | 1017 | 1036 | 20768 | 20787 | CCAATGGCCTTTAATGCTGC | 16 | 731 |
| 1481411 | N/A | N/A | 140028 | 140047 | TAAAACATCTTTCTACGGTC | 31 | 732 |
| 1481423 | 847 | 866 | 18284 | 18303 | ATCTTCCCCAAAGAATCTAT | 99 | 733 |
| 1481483 | 3632 | 3651 | 224000 | 224019 | CTGTCTTCAGAAAAACCTCT | 43 | 734 |
| 1481514 | N/A | N/A | 166636 | 166655 | TCATAACCATTGCATTGCAC | 15 | 735 |
| 1481555 | N/A | N/A | 63345 | 63364 | CTCAGTGAAACTTTCCCCGA | 56 | 736 |
| 1481556 | N/A | N/A | 23118 | 23137 | AGTACTTACCACAATGCCAA | 107† | 737 |
| 1481558 | 1668 | 1687 | 89483 | 89502 | GTCATAAATTCCATTTTACT | 6 | 738 |
| 1481592 | 744 | 763 | 18181 | 18200 | ATGCTTTTGGACCGTTTGTT | 2 | 433 |

TABLE 15
Reduction of MSH3 RNA by 5-10-5 MOE gapmers with mixed internucleoside linkages in A431 cells

| | SEQ | SEQ | SEQ | SEQ | | | |
|---|---|---|---|---|---|---|---|
| | ID | ID | ID | ID | | | |
| | NO: 1 | NO: 1 | NO: 2 | NO: 2 | | MSH3 | SEQ |
| Compound | Start | Stop | Start | Stop | | (% | ID |
| Number | Site | Site | Site | Site | Sequence (5′ to 3′) | UTC) | No. |
| 1479819 | N/A | N/A | 211036 | 211055 | CTTCACTATACCTTTTCCCT | 21 | 739 |
| 1479834 | N/A | N/A | 35953 | 35972 | GCTCTTTAATTCCTCCCCTT | 20 | 740 |
| 1479851 | N/A | N/A | 123748 | 123767 | TAAACCTACCTTCCAACCTT | 64 | 741 |
| 1479865 | N/A | N/A | 3161 | 3180 | AACCTTTGCCTATCTCCTCA | 43 | 742 |
| 1479867 | N/A | N/A | 200852 | 200871 | ACATACTTCACATTTGACCT | 39 | 743 |
| 1479889 | N/A | N/A | 118297 | 118316 | TTGGCACTTACACTTACTTT | 7 | 744 |
| 1479894 | 3631 | 3650 | 223999 | 224018 | TGTCTTCAGAAAAACCTCTC | 56 | 745 |
| 1479908 | N/A | N/A | 116832 | 116851 | CAGTTTTATCCCCAACTCTA | 14 | 746 |
| 1479946 | N/A | N/A | 3247 | 3266 | GCACCCCTTGCCCACAAGCC | 51 | 747 |
| 1479949 | 1016 | 1035 | 20767 | 20786 | CAATGGCCTTTAATGCTGCA | 13 | 748 |
| 1479954 | N/A | N/A | 4408 | 4427 | CTGTCAATTTCTGTAGCCTA | 13 | 749 |
| 1480046 | N/A | N/A | 72091 | 72110 | CTGCACATATCCCTCACTAA | 17 | 750 |
| 1480062 | 3166 | 3185 | 212898 | 212917 | ACTGACCAAGAATCCCATGT | 35 | 751 |
| 1480064 | 3353 | 3372 | 221258 | 221277 | TTATTAATCCTTCCAGCTCT | 117 | 752 |
| 1480093 | N/A | N/A | 20344 | 20363 | GACCTTATATCCTTTTGCCA | 10 | 753 |
| 1480116 | N/A | N/A | 13374 | 13393 | ACTGGATACTCATCTATAGC | 65 | 754 |
| 1480141 | N/A | N/A | 62712 | 62731 | TGGTTACTCAATTACAGTTC | 5 | 755 |
| 1480180 | N/A | N/A | 157408 | 157427 | ACTTATTGTTCAATTTGGCT | 38 | 756 |
| 1480199 | N/A | N/A | 3510 | 3529 | TATACCATCCTAAGAAACTT | 77 | 757 |
| 1480200 | N/A | N/A | 111353 | 111372 | AACTCATATATCTTTCTCCC | 19 | 758 |
| 1480203 | 3432 | 3451 | 223800 | 223819 | TCTGTCCACTTCTGCAGGTC | 49 | 759 |
| 1480220 | 1905 | 1924 | 109607 | 109626 | AGATGATTTTCTATCTGACC | 7 | 760 |
| 1480231 | 1661 | 1680 | 89476 | 89495 | ATTCCATTTTACTTGATAGC | 13 | 761 |
| 1480236 | 2482 | 2501 | 126803 | 126822 | CCATTCAGCACTGCAGTCAA | 52 | 762 |
| 1480274 | N/A | N/A | 130311 | 130330 | GCTACCATCCTTTTCATTCC | 14 | 763 |
| 1480294 | N/A | N/A | 122139 | 122158 | GAAGTTCTATCACACCATTC | 6 | 764 |
| 1480409 | 2922 | 2941 | 202158 | 202177 | TCCATAAATGTACTCTGTCC | 38 | 765 |
| 1480422 | 1797 | 1816 | 92569 | 92588 | CACTTCTTTAACTTCCGTCT | 9 | 766 |
| 1480446 | N/A | N/A | 169633 | 169652 | AGGTTGATAAACTAACAGCT | 52 | 767 |
| 1480505 | N/A | N/A | 94920 | 94939 | TGGTAATTATCATCATCCAA | 33 | 768 |
| 1480558 | N/A | N/A | 22974 | 22993 | GGGATTCACATTTAATAATA | 23 | 769 |
| 1480590 | N/A | N/A | 115370 | 115389 | GCTTCACAATAACCATGTAA | 22 | 770 |
| 1480626 | N/A | N/A | 141809 | 141828 | TCACTATTTTTACCCAGCTT | 26 | 771 |
| 1480680 | N/A | N/A | 68971 | 68990 | GTAAAAGTATTCTTCCACAT | 10 | 772 |
| 1480687 | N/A | N/A | 215177 | 215196 | TGGGATTATATATACTGCAT | 28 | 773 |
| 1480688 | 1436 | 1455 | 73468 | 73487 | CCATCCTTTCGACTCGAATT | 7 | 774 |
| 1480728 | N/A | N/A | 3339 | 3358 | TTCTTCTAGTCACCCAATCC | 51 | 775 |
| 1480731 | N/A | N/A | 92205 | 92224 | ATTGCATACTTTCCTACCTT | 20 | 776 |
| 1480735 | 2689 | 2708 | 140798 | 140817 | TTGATCCTGTTCTCCCAGCA | 14 | 777 |
| 1480741 | N/A | N/A | 63344 | 63363 | TCAGTGAAACTTTCCCCGAT | 58 | 778 |
| 1480748 | 1606 | 1625 | 76923 | 76942 | CAAGTTGAATTCTTTGAGGT | 14 | 779 |
| 1480755 | N/A | N/A | 181866 | 181885 | CAGAGTCTTTGATACCATTC | 38 | 780 |
| 1480759 | N/A | N/A | 28433 | 28452 | TTCAACTTATGAATTTATCC | 4 | 781 |
| 1480766 | 530 | 549 | 13234 | 13253 | GCAGAGATTCTGTCTGGACT | 14 | 782 |
| 1480778 | 3776 | 3795 | 224144 | 224163 | ACCCTCCAAAAGCTTGGGAA | 50 | 783 |
| 1480822 | N/A | N/A | 19225 | 19244 | CATCTGCAATACTTTCCCTA | 61 | 784 |
| 1480829 | N/A | N/A | 109542 | 109561 | CCGGGCATTTATTTCCCTGT | 52 | 785 |
| 1480832 | N/A | N/A | 37130 | 37149 | CTTGACCCATATTTTCCTAA | 42 | 786 |
| 1480907 | 2537 | 2556 | 135586 | 135605 | GCACTGCTTTACACAAGGAG | 15 | 787 |
| 1480919 | N/A | N/A | 105134 | 105153 | CCTGCAACAAATATCTCATA | 41 | 788 |
| 1480976 | N/A | N/A | 12934 | 12953 | GCAATTTCACTCATTCCTGA | 13 | 789 |
| 1480996 | N/A | N/A | 185190 | 185209 | CTTCACTTTTACTAACAGCT | 68 | 790 |
| 1481029 | 3860 | 3879 | 224228 | 224247 | CAATGGATAGATTCCTGCCA | 30 | 791 |
| 1481047 | N/A | N/A | 147276 | 147295 | TTGCACTTTTAACCCAAGGT | 22 | 792 |
| 1481107 | N/A | N/A | 53050 | 53069 | TGCTTGCTACTCTATAAAAC | 58 | 793 |
| 1481133 | N/A | N/A | 175238 | 175257 | ATATCTCTTTTCATCAACGC | 18 | 794 |
| 1481140 | 2826 | 2845 | 161674 | 161693 | ACATAGGAGCCAATCTGAGC | 24 | 38 |
| 1481145 | N/A | N/A | 79633 | 79652 | CCAGTTTGATCACTATCTTT | 11 | 795 |
| 1481164 | N/A | N/A | 116991 | 117010 | ACATTACCTCCTGTCCTGAT | 39 | 796 |
| 1481173 | N/A | N/A | 75434 | 75453 | ACTTTCTTGCAATAAGCATT | 50 | 797 |
| 1481175 | N/A | N/A | 140027 | 140046 | AAAACATCTTTCTACGGTCT | 21 | 798 |
| 1481208 | 3063 | 3082 | 202299 | 202318 | ACATCTCTGATGAAATACTC | 34 | 799 |
| 1481210 | N/A | N/A | 3471 | 3490 | TCAGACTTTATAATCTAAAC | 73 | 800 |
| 1481223 | 681 | 700 | 18118 | 18137 | TTTGATGATCCAAACTGACT | 30 | 801 |
| 1481229 | N/A | N/A | 166577 | 166596 | GTATCATTAGATACCCTGTC | 39 | 802 |
| 1481270 | 1271 | 1290 | 26944 | 26963 | TATCAAACACAACCTCGCCT | 5† | 803 |
| 1481277 | N/A | N/A | 4526 | 4545 | CCCCCACAACTCACCAGAGT | 54 | 804 |
| 1481374 | N/A | N/A | 45594 | 45613 | CCAACATGTTTCCTTAACTT | 7 | 805 |
| 1481399 | 4376 | 4395 | 224744 | 224763 | CATCCAACAATCTTTAAACT | 63 | 806 |
| 1481403 | 842 | 861 | 18279 | 18298 | CCCCAAAGAATCTATACTTA | 60 | 807 |
| 1481446 | N/A | N/A | 84343 | 84362 | GTCTTAAATCCTATCACCTC | 21 | 808 |
| 1481532 | N/A | N/A | 100780 | 100799 | TCCAATATATAACCAGACAA | 20 | 809 |
| 1481550 | 3267 | 3286 | 221172 | 221191 | CCATAACTCCTTGCTGCAAT | 21 | 810 |
| 1481592 | 744 | 763 | 18181 | 18200 | ATGCTTTTGGACCGTTTGTT | 2 | 433 |
| 1481594 | N/A | N/A | 138044 | 138063 | AGTAGATATACCAATCTACT | 111 | 811 |
| 1481612 | N/A | N/A | 23117 | 23136 | GTACTTACCACAATGCCAAT | 52† | 812 |
| 1481622 | N/A | N/A | 163448 | 163467 | ACATTCTTGCTATTCGGCTC | 24 | 813 |
| 1481645 | 2739 | 2758 | 161587 | 161606 | ATCATTACTCTCTCTGAGTC | 31 | 814 |

TABLE 16
Reduction of MSH3 RNA by 5-10-5 MOE gapmers with mixed internucleoside linkages in A431 cells

| | SEQ | SEQ | SEQ | SEQ | | | |
|---|---|---|---|---|---|---|---|
| | ID | ID | ID | ID | | | |
| | NO: 1 | NO: 1 | NO: 2 | NO: 2 | | MSH3 | SEQ |
| Compound | Start | Stop | Start | Stop | | (% | ID |
| Number | Site | Site | Site | Site | Sequence (5′ to 3′) | UTC) | No. |
| 1479825 | 1904 | 1923 | 109606 | 109625 | GATGATTTTCTATCTGACCA | 21 | 815 |
| 1479847 | N/A | N/A | 22698 | 22717 | TGGTTCATTTCACACAGTAC | 10 | 816 |
| 1479876 | N/A | N/A | 109540 | 109559 | GGGCATTTATTTCCCTGTGA | 23 | 817 |
| 1479885 | N/A | N/A | 115329 | 115348 | GACACTTTTATATACTCTTA | 13 | 818 |
| 1479927 | 2738 | 2757 | 161586 | 161605 | TCATTACTCTCTCTGAGTCC | 27 | 819 |
| 1479947 | 679 | 698 | 18116 | 18135 | TGATGATCCAAACTGACTGA | 17 | 820 |
| 1479991 | 1002 | 1021 | 20753 | 20772 | GCTGCAGTTTCAGTTTGCTT | 79 | 821 |
| 1480027 | N/A | N/A | 68916 | 68935 | CTACCACTTACACTTACAGT | 59 | 822 |
| 1480043 | 4374 | 4393 | 224742 | 224761 | TCCAACAATCTTTAAACTGC | 31 | 823 |
| 1480074 | N/A | N/A | 200845 | 200864 | TCACATTTGACCTACAGCAC | 56 | 824 |
| 1480102 | N/A | N/A | 19222 | 19241 | CTGCAATACTTTCCCTAAGT | 27 | 825 |
| 1480130 | N/A | N/A | 94912 | 94931 | ATCATCATCCAAACCATGTC | 39 | 826 |
| 1480144 | 2921 | 2940 | 202157 | 202176 | CCATAAATGTACTCTGTCCT | 42 | 827 |
| 1480156 | N/A | N/A | 3241 | 3260 | CTTGCCCACAAGCCCCCTCA | 75 | 828 |
| 1480175 | N/A | N/A | 3509 | 3528 | ATACCATCCTAAGAAACTTT | 84 | 829 |
| 1480227 | N/A | N/A | 3470 | 3489 | CAGACTTTATAATCTAAACT | 99 | 830 |
| 1480233 | 1435 | 1454 | 73467 | 73486 | CATCCTTTCGACTCGAATTC | 45 | 831 |
| 1480235 | 3163 | 3182 | 212895 | 212914 | GACCAAGAATCCCATGTGGT | 62 | 832 |
| 1480256 | N/A | N/A | 12013 | 12032 | ACACAGTATTTCACCGTTTA | 26 | 833 |
| 1480298 | N/A | N/A | 146528 | 146547 | GCTCAGACATATTTTATGGT | 44 | 834 |
| 1480315 | N/A | N/A | 111352 | 111371 | ACTCATATATCTTTCTCCCC | 29 | 835 |
| 1480324 | N/A | N/A | 79626 | 79645 | GATCACTATCTTTATTAATC | 26 | 836 |
| 1480330 | N/A | N/A | 118296 | 118315 | TGGCACTTACACTTACTTTC | 11 | 837 |
| 1480333 | N/A | N/A | 13373 | 13392 | CTGGATACTCATCTATAGCA | 72 | 838 |
| 1480350 | N/A | N/A | 213788 | 213807 | CCATCCCTATTACTTTTCCA | 33 | 839 |
| 1480375 | N/A | N/A | 4525 | 4544 | CCCCACAACTCACCAGAGTT | 182 | 840 |
| 1480388 | 3628 | 3647 | 223996 | 224015 | CTTCAGAAAAACCTCTCTGT | 89 | 841 |
| 1480410 | 2825 | 2844 | 161673 | 161692 | CATAGGAGCCAATCTGAGCC | 30 | 842 |
| 1480436 | N/A | N/A | 83723 | 83742 | TTTCTAACTTCATACATCTC | 72 | 843 |
| 1480472 | N/A | N/A | 45547 | 45566 | ACTGACATATTTGTAAGGAC | 3 | 844 |
| 1480501 | N/A | N/A | 27774 | 27793 | TAGCACTTAATACATCATGC | 3 | 845 |
| 1480563 | 518 | 537 | 13222 | 13241 | TCTGGACTCTACTTTGAGGA | 19 | 846 |
| 1480619 | 1581 | 1600 | 76898 | 76917 | ATGATGGCAGCCAAAGAGCA | 33 | 847 |
| 1480638 | N/A | N/A | 169449 | 169468 | TCAGACTAATGATAACTTCC | 25 | 848 |
| 1480679 | N/A | N/A | 63343 | 63362 | CAGTGAAACTTTCCCCGATC | 24 | 849 |
| 1480691 | N/A | N/A | 122138 | 122157 | AAGTTCTATCACACCATTCA | 15 | 850 |
| 1480704 | N/A | N/A | 116990 | 117009 | CATTACCTCCTGTCCTGATA | 79 | 851 |
| 1480712 | N/A | N/A | 185104 | 185123 | ACAATGTTTTACTAATGCCT | 30 | 852 |
| 1480719 | N/A | N/A | 35921 | 35940 | TTGCTCCTATTCCCAACTAT | 30 | 853 |
| 1480724 | N/A | N/A | 138037 | 138056 | ATACCAATCTACTTTCCTAC | 49 | 854 |
| 1480753 | N/A | N/A | 166336 | 166355 | CCTATAGTTTCCCACAGTCT | 56 | 855 |
| 1480763 | N/A | N/A | 100667 | 100686 | GAGGAACCACACTAATCCTT | 85 | 856 |
| 1480776 | 3062 | 3081 | 202298 | 202317 | CATCTCTGATGAAATACTCA | 75 | 857 |
| 1480820 | 841 | 860 | 18278 | 18297 | CCCAAAGAATCTATACTTAT | 100 | 858 |
| 1480851 | N/A | N/A | 62626 | 62645 | TTGTCACTTATCCTTGAGGC | 20 | 859 |
| 1480857 | N/A | N/A | 23115 | 23134 | ACTTACCACAATGCCAATAA | 46† | 860 |
| 1480921 | 2688 | 2707 | 140797 | 140816 | TGATCCTGTTCTCCCAGCAA | 28 | 861 |
| 1480928 | 1796 | 1815 | 92568 | 92587 | ACTTCTTTAACTTCCGTCTC | 21 | 862 |
| 1480937 | 2517 | 2536 | 135566 | 135585 | TGATAATGTTCACTGAATTT | 29 | 863 |
| 1480972 | N/A | N/A | 3155 | 3174 | TGCCTATCTCCTCAAACGGA | 87 | 864 |
| 1480983 | N/A | N/A | 130310 | 130329 | CTACCATCCTTTTCATTCCT | 26 | 865 |
| 1481021 | N/A | N/A | 210824 | 210843 | GTTTCACTTTTCCCCACTCA | 31 | 866 |
| 1481077 | N/A | N/A | 116831 | 116850 | AGTTTTATCCCCAACTCTAA | 53 | 867 |
| 1481078 | N/A | N/A | 141808 | 141827 | CACTATTTTTACCCAGCTTC | 51 | 868 |
| 1481080 | 3858 | 3877 | 224226 | 224245 | ATGGATAGATTCCTGCCAGA | 87 | 869 |
| 1481083 | N/A | N/A | 174970 | 174989 | AGTACACATATCATAATGCA | 32 | 870 |
| 1481092 | N/A | N/A | 155466 | 155485 | CCATCACTATGACCTCTGTC | 79 | 871 |
| 1481111 | N/A | N/A | 105133 | 105152 | CTGCAACAAATATCTCATAT | 36 | 872 |
| 1481129 | N/A | N/A | 4400 | 4419 | TTCTGTAGCCTATATCGGGA | 162 | 873 |
| 1481178 | 3262 | 3281 | 221167 | 221186 | ACTCCTTGCTGCAATTCCTC | 43 | 874 |
| 1481191 | N/A | N/A | 92132 | 92151 | CCATTTTATAAACCAATGCT | 61 | 875 |
| 1481197 | N/A | N/A | 75303 | 75322 | TGCTAACAACACCTTTCCGT | 73 | 876 |
| 1481198 | 972 | 991 | 20343 | 20362 | ACCTTATATCCTTTTGCCAC | 14 | 877 |
| 1481207 | 1649 | 1668 | 89464 | 89483 | TTGATAGCTGTTTAAAATTC | 45 | 878 |
| 1481213 | N/A | N/A | 163425 | 163444 | AACAAGATTTCCTTCCAGGC | 32 | 879 |
| 1481218 | 3347 | 3366 | 221252 | 221271 | ATCCTTCCAGCTCTTTTGAC | 92 | 880 |
| 1481228 | 3765 | 3784 | 224133 | 224152 | GCTTGGGAATTATATTCTGC | 52 | 881 |
| 1481266 | N/A | N/A | 123747 | 123766 | AAACCTACCTTCCAACCTTT | 83 | 882 |
| 1481268 | N/A | N/A | 140005 | 140024 | TGTATCTTTTACTTTGATAC | 146 | 883 |
| 1481344 | N/A | N/A | 53031 | 53050 | CGTTCTATCAACATATACTT | 39 | 884 |
| 1481378 | 1266 | 1285 | 26939 | 26958 | AACACAACCTCGCCTGTGGC | 11† | 885 |
| 1481379 | N/A | N/A | 3338 | 3357 | TCTTCTAGTCACCCAATCCA | 151 | 886 |
| 1481492 | N/A | N/A | 180847 | 180866 | GAGGACTTTTCATATTGAAT | 27 | 887 |
| 1481494 | N/A | N/A | 37129 | 37148 | TTGACCCATATTTTCCTAAC | 106 | 888 |
| 1481563 | 2468 | 2487 | 126789 | 126808 | AGTCAAGGACTAGCTGCTCC | 39 | 889 |
| 1481589 | 3431 | 3450 | 223799 | 223818 | CTGTCCACTTCTGCAGGTCT | 53 | 890 |
| 1481592 | 744 | 763 | 18181 | 18200 | ATGCTTTTGGACCGTTTGTT | 4 | 433 |
| 1481616 | N/A | N/A | 72090 | 72109 | TGCACATATCCCTCACTAAT | 45 | 891 |

TABLE 17
Reduction of MSH3 RNA by 5-10-5 MOE gapmers with mixed internucleoside linkages in A431 cells

| | SEQ | SEQ | SEQ | SEQ | | | |
|---|---|---|---|---|---|---|---|
| | ID | ID | ID | ID | | | |
| | NO: 1 | NO: 1 | NO: 2 | NO: 2 | | MSH3 | SEQ |
| Compound | Start | Stop | Start | Stop | | (% | ID |
| Number | Site | Site | Site | Site | Sequence (5′ to 3′) | UTC) | No. |
| 1231144 | 2464 | 2483 | 126785 | 126804 | AAGGACTAGCTGCTCCCGGA | 54 | 892 |
| 1231184 | 3162 | 3181 | 212894 | 212913 | ACCAAGAATCCCATGTGGTA | 78 | 893 |
| 1479821 | 2824 | 2843 | 161672 | 161691 | ATAGGAGCCAATCTGAGCCA | 32 | 894 |
| 1479829 | N/A | N/A | 63342 | 63361 | AGTGAAACTTTCCCCGATCA | 29 | 895 |
| 1479938 | N/A | N/A | 61115 | 61134 | GCATGATCTATACCGACTTT | 4 | 896 |
| 1479981 | 2737 | 2756 | 161585 | 161604 | CATTACTCTCTCTGAGTCCT | 17 | 897 |
| 1480061 | N/A | N/A | 184969 | 184988 | GACAACAATTTATCCTTGCC | 44 | 898 |
| 1480063 | N/A | N/A | 135561 | 135580 | ATGTTCACTGAATTTCCTAC | 32 | 899 |
| 1480077 | 677 | 696 | 18114 | 18133 | ATGATCCAAACTGACTGAGA | 17 | 900 |
| 1480092 | N/A | N/A | 35903 | 35922 | ATTGGCATTCTCTAAGCTCC | 21 | 901 |
| 1480111 | 3626 | 3645 | 223994 | 224013 | TCAGAAAAACCTCTCTGTTT | 86 | 902 |
| 1480125 | 2915 | 2934 | 202151 | 202170 | ATGTACTCTGTCCTTTATAT | 44 | 903 |
| 1480157 | N/A | N/A | 4523 | 4542 | CCACAACTCACCAGAGTTGC | 103 | 904 |
| 1480189 | N/A | N/A | 138036 | 138055 | TACCAATCTACTTTCCTACA | 100 | 905 |
| 1480224 | N/A | N/A | 122130 | 122149 | TCACACCATTCATTTTTAGC | 16 | 906 |
| 1480230 | N/A | N/A | 213722 | 213741 | TGCAGCATACCAATTGCGCA | 148 | 907 |
| 1480271 | N/A | N/A | 3468 | 3487 | GACTTTATAATCTAAACTAC | 97 | 908 |
| 1480325 | N/A | N/A | 165870 | 165889 | TTGTCACAAACTTTTACCTA | 29 | 909 |
| 1480327 | N/A | N/A | 72080 | 72099 | CCTCACTAATCACATCCCTC | 68 | 910 |
| 1480335 | N/A | N/A | 169029 | 169048 | TAAGTATCATGATTATCCCA | 36 | 911 |
| 1480392 | N/A | N/A | 65908 | 65927 | TCTGTTTTATCTCATAAGCA | 14 | 912 |
| 1480397 | N/A | N/A | 154836 | 154855 | GGGACATATTCATATGTTCA | 78 | 913 |
| 1480406 | N/A | N/A | 116623 | 116642 | GCTTTTTAACTTCATGATTC | 14 | 914 |
| 1480445 | N/A | N/A | 83717 | 83736 | ACTTCATACATCTCGCTCTT | 44 | 915 |
| 1480452 | N/A | N/A | 37128 | 37147 | TGACCCATATTTTCCTAACA | 55 | 916 |
| 1480493 | N/A | N/A | 3336 | 3355 | TTCTAGTCACCCAATCCAGC | 62 | 917 |
| 1480502 | 1432 | 1451 | 73464 | 73483 | CCTTTCGACTCGAATTCTGT | 25 | 918 |
| 1480513 | 1903 | 1922 | 109605 | 109624 | ATGATTTTCTATCTGACCAA | 15 | 919 |
| 1480518 | 2687 | 2706 | 140796 | 140815 | GATCCTGTTCTCCCAGCAAC | 27 | 920 |
| 1480522 | N/A | N/A | 11947 | 11966 | CTGCACACATTTATCACCTC | 32 | 921 |
| 1480539 | N/A | N/A | 146396 | 146415 | CAGCTAGACATTATTTGTAC | 41 | 922 |
| 1480541 | 517 | 536 | 13221 | 13240 | CTGGACTCTACTTTGAGGAA | 10 | 923 |
| 1480596 | N/A | N/A | 100664 | 100683 | GAACCACACTAATCCTTTTA | 59 | 924 |
| 1480597 | N/A | N/A | 130197 | 130216 | TCACCAGTAACCTCACCATC | 31 | 925 |
| 1480600 | N/A | N/A | 13362 | 13381 | TCTATAGCAGTTACATACCT | 98 | 926 |
| 1480613 | N/A | N/A | 91992 | 92011 | TTGCCACTTAAAATTTGGGT | 25 | 927 |
| 1480629 | 993 | 1012 | 20744 | 20763 | TCAGTTTGCTTCACAACTCC | 18 | 928 |
| 1480649 | 3059 | 3078 | 202295 | 202314 | CTCTGATGAAATACTCAAGT | 60 | 929 |
| 1480720 | N/A | N/A | 180759 | 180778 | TTGGACATACTTCAAGTGCT | 26 | 930 |
| 1480810 | 971 | 990 | 20342 | 20361 | CCTTATATCCTTTTGCCACC | 11 | 931 |
| 1480868 | N/A | N/A | 139752 | 139771 | CTGTAATCTATCATTCTGTA | 72 | 932 |
| 1480872 | 3346 | 3365 | 221251 | 221270 | TCCTTCCAGCTCTTTTGACT | 60 | 933 |
| 1480894 | N/A | N/A | 79580 | 79599 | TTCCAATGAAATATACCCTC | 51 | 934 |
| 1480898 | N/A | N/A | 111348 | 111367 | ATATATCTTTCTCCCCAGGA | 39 | 935 |
| 1480916 | 3764 | 3783 | 224132 | 224151 | CTTGGGAATTATATTCTGCC | 28 | 936 |
| 1480951 | N/A | N/A | 3151 | 3170 | TATCTCCTCAAACGGAAGTA | 91 | 937 |
| 1480954 | N/A | N/A | 116989 | 117008 | ATTACCTCCTGTCCTGATAC | 52 | 938 |
| 1480975 | 1265 | 1284 | 26938 | 26957 | ACACAACCTCGCCTGTGGCA | 3† | 939 |
| 1481006 | N/A | N/A | 89462 | 89481 | GATAGCTGTTTAAAATTCCT | 15 | 940 |
| 1481011 | 1228 | 1247 | 23103 | 23122 | GCCAATAAAAATGTTGCCCT | 23† | 941 |
| 1481024 | N/A | N/A | 141796 | 141815 | CCAGCTTCTATCACTCTCTT | 53 | 942 |
| 1481050 | N/A | N/A | 118294 | 118313 | GCACTTACACTTACTTTCTC | 9 | 943 |
| 1481052 | N/A | N/A | 200826 | 200845 | CCATAATGTACCTTTCATTT | 51 | 944 |
| 1481082 | 1795 | 1814 | 92567 | 92586 | CTTCTTTAACTTCCGTCTCC | 37 | 945 |
| 1481103 | N/A | N/A | 19189 | 19208 | GTTCAAATTTCACTTTCAAC | 13 | 946 |
| 1481118 | 4373 | 4392 | 224741 | 224760 | CCAACAATCTTTAAACTGCT | 36 | 947 |
| 1481158 | 3388 | 3407 | 223756 | 223775 | CTTTGCAAAATACTTGAGTC | 55 | 948 |
| 1481188 | 840 | 859 | 18277 | 18296 | CCAAAGAATCTATACTTATA | 47 | 949 |
| 1481212 | N/A | N/A | 4399 | 4418 | TCTGTAGCCTATATCGGGAA | 95 | 950 |
| 1481245 | N/A | N/A | 75302 | 75321 | GCTAACAACACCTTTCCGTT | 50 | 951 |
| 1481255 | N/A | N/A | 52914 | 52933 | CCAGACCATTATTCTGTGCT | 21 | 952 |
| 1481261 | N/A | N/A | 105131 | 105150 | GCAACAAATATCTCATATAC | 42 | 953 |
| 1481297 | 3850 | 3869 | 224218 | 224237 | ATTCCTGCCAGATTCACCCA | 53 | 954 |
| 1481299 | 3260 | 3279 | 221165 | 221184 | TCCTTGCTGCAATTCCTCTA | 45 | 955 |
| 1481313 | N/A | N/A | 108809 | 108828 | ATAAGCTTTCACATTCTCCT | 49 | 956 |
| 1481321 | N/A | N/A | 3240 | 3259 | TTGCCCACAAGCCCCCTCAT | 93 | 957 |
| 1481326 | N/A | N/A | 123746 | 123765 | AACCTACCTTCCAACCTTTA | 90 | 958 |
| 1481364 | N/A | N/A | 27773 | 27792 | AGCACTTAATACATCATGCC | 13 | 959 |
| 1481387 | N/A | N/A | 115028 | 115047 | GAACTCCATAATTTCAACAT | 31 | 960 |
| 1481420 | N/A | N/A | 174969 | 174988 | GTACACATATCATAATGCAC | 27 | 961 |
| 1481436 | N/A | N/A | 45529 | 45548 | ACATCACTACTATAACCTGA | 23 | 962 |
| 1481444 | N/A | N/A | 22615 | 22634 | GCATGCCTTATCTTTCCTAA | 24 | 963 |
| 1481458 | N/A | N/A | 162998 | 163017 | CACAAAGCTTGACTATGCAC | 41 | 964 |
| 1481533 | N/A | N/A | 210804 | 210823 | CCTCCACCATTTTAAAGTTT | 80 | 965 |
| 1481566 | 1575 | 1594 | 76892 | 76911 | GCAGCCAAAGAGCAAATCAC | 63 | 966 |
| 1481576 | N/A | N/A | 94911 | 94930 | TCATCATCCAAACCATGTCT | 49 | 967 |
| 1481592 | 744 | 763 | 18181 | 18200 | ATGCTTTTGGACCGTTTGTT | 2 | 433 |
| 1481620 | N/A | N/A | 3508 | 3527 | TACCATCCTAAGAAACTTTA | 88 | 968 |

TABLE 18
Reduction of MSH3 RNA by 5-10-5 MOE gapmers with mixed internucleoside linkages in A431 cells

| | SEQ | SEQ | SEQ | SEQ | | | |
|---|---|---|---|---|---|---|---|
| | ID | ID | ID | ID | | | |
| | NO: 1 | NO: 1 | NO: 2 | NO: 2 | | MSH3 | SEQ |
| Compound | Start | Stop | Start | Stop | | (% | ID |
| Number | Site | Site | Site | Site | Sequence (5′ to 3′) | UTC) | No. |
| 1479839 | N/A | N/A | 111232 | 111251 | AGAAGCAGTACTTATCATTC | 20 | 969 |
| 1479852 | N/A | N/A | 135558 | 135577 | TTCACTGAATTTCCTACGGA | 114 | 970 |
| 1479891 | N/A | N/A | 118293 | 118312 | CACTTACACTTACTTTCTCC | 14 | 971 |
| 1479898 | 3384 | 3403 | 223752 | 223771 | GCAAAATACTTGAGTCTCTT | 21 | 972 |
| 1479902 | N/A | N/A | 174893 | 174912 | AATCTGCTTCTTATTCAGGA | 43 | 973 |
| 1479963 | N/A | N/A | 71643 | 71662 | GTGGTACTTTATCATAACCA | 44 | 974 |
| 1479972 | N/A | N/A | 129978 | 129997 | ACTGTATCATACTTTTACTT | 36 | 975 |
| 1480016 | 4372 | 4391 | 224740 | 224759 | CAACAATCTTTAAACTGCTT | 29 | 976 |
| 1480019 | 3617 | 3636 | 223985 | 224004 | CCTCTCTGTTTCCAATAGGA | 26 | 977 |
| 1480048 | 1794 | 1813 | 92566 | 92585 | TTCTTTAACTTCCGTCTCCC | 43 | 978 |
| 1480099 | N/A | N/A | 3507 | 3526 | ACCATCCTAAGAAACTTTAT | 137 | 979 |
| 1480120 | N/A | N/A | 180312 | 180331 | GCAGAACTTTTTCATCAGAA | 11 | 980 |
| 1480129 | N/A | N/A | 162863 | 162882 | CAGGATATTTCACTCATATT | 26 | 981 |
| 1480154 | N/A | N/A | 91991 | 92010 | TGCCACTTAAAATTTGGGTC | 32 | 982 |
| 1480168 | 675 | 694 | 18112 | 18131 | GATCCAAACTGACTGAGATC | 62 | 983 |
| 1480201 | N/A | N/A | 19188 | 19207 | TTCAAATTTCACTTTCAACC | 95 | 984 |
| 1480214 | N/A | N/A | 3239 | 3258 | TGCCCACAAGCCCCCTCATC | 139 | 985 |
| 1480267 | N/A | N/A | 26919 | 26938 | AGGCTGCACTCCCTAAAAAC | 13† | 986 |
| 1480289 | N/A | N/A | 52628 | 52647 | TCACCACCACCTTATTTGCC | 55 | 987 |
| 1480291 | N/A | N/A | 213414 | 213433 | GTCAAACCACTTTACCTGTC | 66 | 988 |
| 1480300 | N/A | N/A | 11946 | 11965 | TGCACACATTTATCACCTCT | 32 | 989 |
| 1480320 | N/A | N/A | 139663 | 139682 | CTGGATTTAATATATTCCTT | 150 | 990 |
| 1480346 | 2312 | 2331 | 116982 | 117001 | CCTGTCCTGATACTGTCACA | 59 | 991 |
| 1480370 | 2913 | 2932 | 202149 | 202168 | GTACTCTGTCCTTTATATAT | 97 | 992 |
| 1480423 | N/A | N/A | 3335 | 3354 | TCTAGTCACCCAATCCAGCA | 53 | 993 |
| 1480431 | N/A | N/A | 169026 | 169045 | GTATCATGATTATCCCATCT | 15 | 994 |
| 1480433 | 2682 | 2701 | 140791 | 140810 | TGTTCTCCCAGCAACACATC | 34 | 995 |
| 1480473 | N/A | N/A | 152925 | 152944 | GCTGCCTAATCATATACATA | 83 | 996 |
| 1480474 | 3161 | 3180 | 212893 | 212912 | CCAAGAATCCCATGTGGTAA | 44 | 997 |
| 1480478 | N/A | N/A | 100663 | 100682 | AACCACACTAATCCTTTTAC | 76 | 998 |
| 1480481 | N/A | N/A | 104829 | 104848 | ATAGCTTCACCTTTCACATA | 44 | 999 |
| 1480504 | N/A | N/A | 65893 | 65912 | AAGCAACTACCAATGTTCCA | 28 | 1000 |
| 1480533 | N/A | N/A | 93739 | 93758 | GCTCAAAATTTTATTCCTTA | 7 | 1001 |
| 1480538 | N/A | N/A | 184497 | 184516 | ACACCTTTATTCCTCTGTGT | 63 | 1002 |
| 1480624 | N/A | N/A | 138032 | 138051 | AATCTACTTTCCTACAAGCA | 69 | 1003 |
| 1480634 | 992 | 1011 | 20743 | 20762 | CAGTTTGCTTCACAACTCCC | 20 | 1004 |
| 1480711 | N/A | N/A | 116615 | 116634 | ACTTCATGATTCCCATGGTA | 25 | 1005 |
| 1480751 | 491 | 510 | 13195 | 13214 | AATCGCAGCAGAATTCTTTC | 91 | 1006 |
| 1480788 | 3258 | 3277 | 221163 | 221182 | CTTGCTGCAATTCCTCTAGT | 50 | 1007 |
| 1480790 | N/A | N/A | 35860 | 35879 | TCCGCTTTTTCCTTTAGGGA | 2 | 1008 |
| 1480849 | N/A | N/A | 165864 | 165883 | CAAACTTTTACCTAATGTCT | 46 | 1009 |
| 1480853 | 2461 | 2480 | 126782 | 126801 | GACTAGCTGCTCCCGGAGCT | 33 | 1010 |
| 1480858 | N/A | N/A | 123745 | 123764 | ACCTACCTTCCAACCTTTAC | 89 | 1011 |
| 1480861 | N/A | N/A | 146350 | 146369 | CTGTTCATCTTTACCAGCTT | 38 | 1012 |
| 1480878 | 1202 | 1221 | 23077 | 23096 | TGTCCCTAACATTTTCCTTA | 3 | 1013 |
| 1480900 | N/A | N/A | 27697 | 27716 | CCAGACATATATCATAACCA | 3 | 1014 |
| 1480929 | N/A | N/A | 61061 | 61080 | TGGACAGTATCCTCTGGGAA | 21 | 1015 |
| 1480965 | N/A | N/A | 161583 | 161602 | TTACTCTCTCTGAGTCCTCC | 41 | 1016 |
| 1480984 | N/A | N/A | 122128 | 122147 | ACACCATTCATTTTTAGCCT | 13 | 1017 |
| 1481053 | N/A | N/A | 82347 | 82366 | ATTCTAGATACTATCACTCC | 64 | 1018 |
| 1481054 | N/A | N/A | 200699 | 200718 | CTGTTCCAATAACTAGCGGC | 74 | 1019 |
| 1481065 | N/A | N/A | 4522 | 4541 | CACAACTCACCAGAGTTGCC | 96 | 1020 |
| 1481070 | N/A | N/A | 4328 | 4347 | AGCAATTTAAACCTTACAAC | 76 | 1021 |
| 1481084 | N/A | N/A | 3150 | 3169 | ATCTCCTCAAACGGAAGTAC | 99 | 1022 |
| 1481085 | N/A | N/A | 63341 | 63360 | GTGAAACTTTCCCCGATCAC | 58 | 1023 |
| 1481095 | N/A | N/A | 22458 | 22477 | CCATAATGTTTAATTCCACA | 4 | 1024 |
| 1481119 | N/A | N/A | 74834 | 74853 | TCTTAAGATTTATCAGGTCT | 93 | 1025 |
| 1481206 | N/A | N/A | 13360 | 13379 | TATAGCAGTTACATACCTTT | 98 | 1026 |
| 1481300 | N/A | N/A | 108104 | 108123 | CTGTTGACATCATACACACT | 74 | 1027 |
| 1481306 | 1901 | 1920 | 109603 | 109622 | GATTTTCTATCTGACCAAAC | 12 | 1028 |
| 1481307 | 3057 | 3076 | 202293 | 202312 | CTGATGAAATACTCAAGTGT | 71 | 1029 |
| 1481337 | N/A | N/A | 89459 | 89478 | AGCTGTTTAAAATTCCTGTA | 79 | 1030 |
| 1481339 | 967 | 986 | 20338 | 20357 | ATATCCTTTTGCCACCAGGC | 18 | 1031 |
| 1481348 | 837 | 856 | 18274 | 18293 | AAGAATCTATACTTATATCC | 66 | 1032 |
| 1481401 | N/A | N/A | 45464 | 45483 | TAAGAATCTTTCTTTGCAAC | 29 | 1033 |
| 1481432 | 3848 | 3867 | 224216 | 224235 | TCCTGCCAGATTCACCCAGT | 39 | 1034 |
| 1481461 | 2805 | 2824 | 161653 | 161672 | ATGATGGTAATCAATGCAAC | 45 | 1035 |
| 1481478 | 1568 | 1587 | 76885 | 76904 | AAGAGCAAATCACAGGCTTC | 52 | 1036 |
| 1481501 | 3345 | 3364 | 221250 | 221269 | CCTTCCAGCTCTTTTGACTT | 87 | 1037 |
| 1481502 | N/A | N/A | 79443 | 79462 | AGCAGAGCACTTTATGTCTT | 18 | 1038 |
| 1481511 | N/A | N/A | 3431 | 3450 | GAACTGCACAATATGACTGC | 75 | 1039 |
| 1481516 | 1431 | 1450 | 73463 | 73482 | CTTTCGACTCGAATTCTGTC | 36 | 1040 |
| 1481518 | N/A | N/A | 141407 | 141426 | TCTCTGCTATACAACAAGCT | 65 | 1041 |
| 1481547 | 3763 | 3782 | 224131 | 224150 | TTGGGAATTATATTCTGCCA | 43 | 1042 |
| 1481572 | N/A | N/A | 37127 | 37146 | GACCCATATTTTCCTAACAC | 50 | 1043 |
| 1481592 | 744 | 763 | 18181 | 18200 | ATGCTTTTGGACCGTTTGTT | 3 | 433 |
| 1481615 | N/A | N/A | 115026 | 115045 | ACTCCATAATTTCAACATAC | 27 | 1044 |
| 1481633 | N/A | N/A | 208093 | 208112 | TGCTTATGTACACTTAAGTA | 55 | 1045 |

TABLE 19
Reduction of MSH3 RNA by 5-10-5 MOE gapmers with mixed internucleoside linkages in A431 cells

| | SEQ | SEQ | SEQ | SEQ | | | |
|---|---|---|---|---|---|---|---|
| | ID | ID | ID | ID | | | |
| | NO: 1 | NO: 1 | NO: 2 | NO: 2 | | MSH3 | SEQ |
| Compound | Start | Stop | Start | Stop | | (% | ID |
| Number | Site | Site | Site | Site | Sequence (5′ to 3′) | UTC) | No. |
| 1479808 | N/A | N/A | 3430 | 3449 | AACTGCACAATATGACTGCT | 87 | 1046 |
| 1479828 | N/A | N/A | 93615 | 93634 | TCACCATCACACCATATTCA | 71 | 1047 |
| 1479846 | 3257 | 3276 | 221162 | 221181 | TTGCTGCAATTCCTCTAGTT | 96 | 1048 |
| 1479920 | N/A | N/A | 3238 | 3257 | GCCCACAAGCCCCCTCATCA | 145 | 1049 |
| 1479970 | N/A | N/A | 122127 | 122146 | CACCATTCATTTTTAGCCTT | 13 | 1050 |
| 1479976 | N/A | N/A | 19174 | 19193 | TCAACCTTCTTGACTAGGGC | 23 | 1051 |
| 1479999 | N/A | N/A | 146349 | 146368 | TGTTCATCTTTACCAGCTTC | 52 | 1052 |
| 1480001 | N/A | N/A | 3141 | 3160 | AACGGAAGTACTAAAACCTC | 141 | 1053 |
| 1480004 | N/A | N/A | 3506 | 3525 | CCATCCTAAGAAACTTTATC | 97 | 1054 |
| 1480018 | 3762 | 3781 | 224130 | 224149 | TGGGAATTATATTCTGCCAC | 33 | 1055 |
| 1480034 | N/A | N/A | 174356 | 174375 | ATCTTATGCAAATATCTCAT | 30 | 1056 |
| 1480073 | N/A | N/A | 63340 | 63359 | TGAAACTTTCCCCGATCACC | 46 | 1057 |
| 1480076 | N/A | N/A | 161577 | 161596 | TCTCTGAGTCCTCCTGAAAA | 72 | 1058 |
| 1480089 | N/A | N/A | 3334 | 3353 | CTAGTCACCCAATCCAGCAC | 109 | 1059 |
| 1480090 | 4368 | 4387 | 224736 | 224755 | AATCTTTAAACTGCTTAATC | 49 | 1060 |
| 1480095 | N/A | N/A | 141347 | 141366 | CTGTTCCTAATACTTCATTA | 28 | 1061 |
| 1480103 | N/A | N/A | 71642 | 71661 | TGGTACTTTATCATAACCAT | 57 | 1062 |
| 1480122 | 991 | 1010 | 20742 | 20761 | AGTTTGCTTCACAACTCCCA | 5 | 1063 |
| 1480152 | N/A | N/A | 78790 | 78809 | TAGTTTCCTTATCCCAACAT | 52 | 1064 |
| 1480216 | N/A | N/A | 13359 | 13378 | ATAGCAGTTACATACCTTTT | 152 | 1065 |
| 1480245 | N/A | N/A | 129975 | 129994 | GTATCATACTTTTACTTTAC | 12 | 1066 |
| 1480287 | 2449 | 2468 | 126770 | 126789 | CCGGAGCTGATTCAGATGTC | 61 | 1067 |
| 1480367 | N/A | N/A | 118292 | 118311 | ACTTACACTTACTTTCTCCA | 14 | 1068 |
| 1480411 | 3847 | 3866 | 224215 | 224234 | CCTGCCAGATTCACCCAGTT | 43 | 1069 |
| 1480416 | N/A | N/A | 179021 | 179040 | GCATAGTCCCATTTTAACTT | 27 | 1070 |
| 1480427 | N/A | N/A | 200631 | 200650 | TGGCTACTTTTTCAAAGTTC | 64 | 1071 |
| 1480428 | N/A | N/A | 11945 | 11964 | GCACACATTTATCACCTCTT | 7 | 1072 |
| 1480451 | N/A | N/A | 152923 | 152942 | TGCCTAATCATATACATATC | 148 | 1073 |
| 1480461 | N/A | N/A | 107956 | 107975 | AGAGCTTCTATACTAACTTC | 51 | 1074 |
| 1480476 | 1201 | 1220 | 23076 | 23095 | GTCCCTAACATTTTCCTTAT | 3 | 1075 |
| 1480520 | 1564 | 1583 | 76881 | 76900 | GCAAATCACAGGCTTCTCTA | 12 | 1076 |
| 1480531 | 3054 | 3073 | 202290 | 202309 | ATGAAATACTCAAGTGTAGC | 43 | 1077 |
| 1480537 | 416 | 435 | 4509 | 4528 | AGTTGCCAGACATTCCCAGA | 31 | 1078 |
| 1480571 | 2681 | 2700 | 140790 | 140809 | GTTCTCCCAGCAACACATCA | 44 | 1079 |
| 1480603 | N/A | N/A | 116359 | 116378 | CCTGTGTTTTACCTTTCCAT | 17 | 1080 |
| 1480614 | N/A | N/A | 137831 | 137850 | AAGCATAATATCCTACCAAT | 61 | 1081 |
| 1480689 | 666 | 685 | 18103 | 18122 | TGACTGAGATCAAAAAGTGT | 112 | 1082 |
| 1480705 | N/A | N/A | 111227 | 111246 | CAGTACTTATCATTCTAGTA | 16 | 1083 |
| 1480707 | 1793 | 1812 | 92565 | 92584 | TCTTTAACTTCCGTCTCCCA | 30 | 1084 |
| 1480721 | N/A | N/A | 114943 | 114962 | TGGTAACACTTTCTTTGTAT | 20 | 1085 |
| 1480736 | N/A | N/A | 184253 | 184272 | ATACAACTTACTCAATCCAC | 42 | 1086 |
| 1480793 | N/A | N/A | 139444 | 139463 | GCATCTAGAACATATTCATT | 60 | 1087 |
| 1480799 | 2909 | 2928 | 202145 | 202164 | TCTGTCCTTTATATATATTG | 56 | 1088 |
| 1480805 | N/A | N/A | 37125 | 37144 | CCCATATTTTCCTAACACTC | 88 | 1089 |
| 1480814 | N/A | N/A | 162862 | 162881 | AGGATATTTCACTCATATTC | 58 | 1090 |
| 1480848 | N/A | N/A | 27107 | 27126 | TCGGTATTATATTCCAGTGA | 5 | 1091 |
| 1480860 | N/A | N/A | 52312 | 52331 | TTGTTTTCTACACTTAGCCA | 20 | 1092 |
| 1480866 | N/A | N/A | 65886 | 65905 | TACCAATGTTCCATCATCAC | 31 | 1093 |
| 1480869 | N/A | N/A | 45277 | 45296 | CAGGCACCTTTCTTATGGCA | 17 | 1094 |
| 1480886 | 1899 | 1918 | 109601 | 109620 | TTTTCTATCTGACCAAACAC | 32 | 1095 |
| 1480925 | N/A | N/A | 35859 | 35878 | CCGCTTTTTCCTTTAGGGAA | 4 | 1096 |
| 1480926 | N/A | N/A | 90784 | 90803 | GTCTCTTTATTCCTACTACT | 20 | 1097 |
| 1480938 | N/A | N/A | 123744 | 123763 | CCTACCTTCCAACCTTTACC | 71 | 1098 |
| 1480958 | N/A | N/A | 3872 | 3891 | ACATAAGTCCTTCACCAGCT | 58 | 1099 |
| 1480971 | 2793 | 2812 | 161641 | 161660 | AATGCAACTTGTTTTATGTA | 33 | 1100 |
| 1481005 | N/A | N/A | 169025 | 169044 | TATCATGATTATCCCATCTT | 44 | 1101 |
| 1481073 | 490 | 509 | 13194 | 13213 | ATCGCAGCAGAATTCTTTCA | 48 | 1102 |
| 1481090 | 3323 | 3342 | 221228 | 221247 | GAGCTGCTTTCTTCAAAATT | 69 | 1103 |
| 1481108 | N/A | N/A | 22232 | 22251 | TCTGGACATATCTTTGGACA | 24 | 1104 |
| 1481122 | 1430 | 1449 | 73462 | 73481 | TTTCGACTCGAATTCTGTCA | 26 | 1105 |
| 1481163 | N/A | N/A | 135557 | 135576 | TCACTGAATTTCCTACGGAA | 83 | 1106 |
| 1481179 | 945 | 964 | 20316 | 20335 | CGTACATGAACAAACAGTCT | 45 | 1107 |
| 1481281 | N/A | N/A | 104825 | 104844 | CTTCACCTTTCACATACACC | 59 | 1108 |
| 1481298 | N/A | N/A | 82345 | 82364 | TCTAGATACTATCACTCCAA | 55 | 1109 |
| 1481311 | N/A | N/A | 207998 | 208017 | GTGCATTACTCATAAAGCAA | 43 | 1110 |
| 1481322 | N/A | N/A | 26918 | 26937 | GGCTGCACTCCCTAAAAACA | 12† | 1111 |
| 1481328 | N/A | N/A | 100662 | 100681 | ACCACACTAATCCTTTTACA | 53 | 1112 |
| 1481372 | 835 | 854 | 18272 | 18291 | GAATCTATACTTATATCCAC | 48 | 1113 |
| 1481394 | N/A | N/A | 89144 | 89163 | TGGTCTTTTATCATTAGCCA | 38 | 1114 |
| 1481427 | N/A | N/A | 60980 | 60999 | GCCGAGTAATTCATTCTCTC | 30 | 1115 |
| 1481434 | 3151 | 3170 | 212883 | 212902 | CATGTGGTAATTCCCCACCT | 74 | 1116 |
| 1481459 | N/A | N/A | 165766 | 165785 | AGGGTGATACTCTAATTCTT | 39 | 1117 |
| 1481489 | N/A | N/A | 73930 | 73949 | GGTCAAAACTCCTTCCACTC | 65 | 1118 |
| 1481521 | N/A | N/A | 223325 | 223344 | GCATAACACAGACTTACTTT | 28 | 1119 |
| 1481522 | 3615 | 3634 | 223983 | 224002 | TCTCTGTTTCCAATAGGAAT | 46 | 1120 |
| 1481559 | N/A | N/A | 212942 | 212961 | CTGCAGGAATATTTCATACC | 93 | 1121 |
| 1481592 | 744 | 763 | 18181 | 18200 | ATGCTTTTGGACCGTTTGTT | 2 | 433 |
| 1481647 | 2311 | 2330 | 116981 | 117000 | CTGTCCTGATACTGTCACAT | 41 | 1122 |

TABLE 20
Reduction of MSH3 RNA by 5-10-5 MOE gapmers with mixed internucleoside linkages in
A431 cells

| | SEQ ID | SEQ ID | SEQ ID | SEQ ID | | | |
|---|---|---|---|---|---|---|---|
| | NO: 1 | NO: 1 | NO: 2 | NO: 2 | | MSH3 | SEQ |
| Compound | Start | Stop | Start | Stop | | (% | ID |
| Number | Site | Site | Site | Site | Sequence (5′ to 3′) | UTC) | No. |
| 1479810 | 3256 | 3275 | 221161 | 221180 | TGCTGCAATTCCTCTAGTTA | 47 | 1123 |
| 1479816 | N/A | N/A | 37124 | 37143 | CCATATTTTCCTAACACTCC | 54 | 1124 |
| 1479923 | N/A | N/A | 107955 | 107974 | GAGCTTCTATACTAACTTCA | 22 | 1125 |
| 1479937 | N/A | N/A | 3505 | 3524 | CATCCTAAGAAACTTTATCC | 71 | 1126 |
| 1479965 | 3321 | 3340 | 221226 | 221245 | GCTGCTTTCTTCAAAATTTC | 104 | 1127 |
| 1479966 | N/A | N/A | 141214 | 141233 | TGCAAAGGCATCTCTGATTC | 29 | 1128 |
| 1479978 | 2304 | 2323 | 116974 | 116993 | GATACTGTCACATATTGTGC | 49 | 1129 |
| 1479982 | N/A | N/A | 139204 | 139223 | TGAGTACCTTTATTTCTACA | 20 | 1130 |
| 1479995 | N/A | N/A | 3333 | 3352 | TAGTCACCCAATCCAGCACT | 51 | 1131 |
| 1479997 | N/A | N/A | 100661 | 100680 | CCACACTAATCCTTTTACAT | 69 | 1132 |
| 1480012 | N/A | N/A | 88107 | 88126 | ATGCAGTAATTCAATATCCT | 16 | 1133 |
| 1480017 | N/A | N/A | 13357 | 13376 | AGCAGTTACATACCTTTTGA | 113 | 1134 |
| 1480026 | 415 | 434 | 4508 | 4527 | GTTGCCAGACATTCCCAGAT | 45 | 1135 |
| 1480054 | 3845 | 3864 | 224213 | 224232 | TGCCAGATTCACCCAGTTGC | 25 | 1136 |
| 1480106 | 2779 | 2798 | 161627 | 161646 | TATGTAGGAGCTCTTTCCAC | 32 | 1137 |
| 1480123 | N/A | N/A | 11705 | 11724 | CCTGTGAATTTTCTAGCCAC | 86 | 1138 |
| 1480149 | 3755 | 3774 | 224123 | 224142 | TATATTCTGCCACTTAAGGC | 52 | 1139 |
| 1480160 | N/A | N/A | 21925 | 21944 | CACACAGTATCATTTAAGGC | 17 | 1140 |
| 1480184 | N/A | N/A | 3140 | 3159 | ACGGAAGTACTAAAACCTCA | 63 | 1141 |
| 1480198 | N/A | N/A | 178967 | 178986 | TCTCTCATATAATCCTTCCT | 47 | 1142 |
| 1480210 | N/A | N/A | 114798 | 114817 | GAGACTTTTTACCCTTTACT | 43 | 1143 |
| 1480211 | 4367 | 4386 | 224735 | 224754 | ATCTTTAAACTGCTTAATCC | 42 | 1144 |
| 1480223 | 1171 | 1190 | 23046 | 23065 | GCACAGAAGATAGCTGGTAG | 0 | 1145 |
| 1480285 | 3148 | 3167 | 212880 | 212899 | GTGGTAATTCCCCACCTGGT | 50 | 1146 |
| 1480316 | N/A | N/A | 17937 | 17956 | CGGCAAACTATCCATAGGTT | 6 | 1147 |
| 1480331 | 1560 | 1579 | 76877 | 76896 | ATCACAGGCTTCTCTAAGTT | 31 | 1148 |
| 1480363 | 3608 | 3627 | 223976 | 223995 | TTCCAATAGGAATATACCAT | 21 | 1149 |
| 1480381 | N/A | N/A | 184252 | 184271 | TACAACTTACTCAATCCACA | 29 | 1150 |
| 1480389 | 1898 | 1917 | 109600 | 109619 | TTTCTATCTGACCAAACACA | 23 | 1151 |
| 1480391 | N/A | N/A | 174350 | 174369 | TGCAAATATCTCATTCTGCT | 94 | 1152 |
| 1480463 | N/A | N/A | 45001 | 45020 | ATAGAATTTTCCCCACTGGT | 3 | 1153 |
| 1480503 | N/A | N/A | 3538 | 3557 | CAGGAAGGACTCCATGATTA | 57 | 1154 |
| 1480535 | N/A | N/A | 3429 | 3448 | ACTGCACAATATGACTGCTT | 125 | 1155 |
| 1480543 | N/A | N/A | 82075 | 82094 | GCATATAACACATTTTAGGT | 4 | 1156 |
| 1480546 | 2908 | 2927 | 202144 | 202163 | CTGTCCTTTATATATATTGT | 40 | 1157 |
| 1480575 | N/A | N/A | 64365 | 64384 | AAAGACTTCCATTTAGAGCA | 33 | 1158 |
| 1480625 | 834 | 853 | 18271 | 18290 | AATCTATACTTATATCCACA | 36 | 1159 |
| 1480682 | N/A | N/A | 200537 | 200556 | GATGAAACTTTCATATCCCT | 39 | 1160 |
| 1480699 | N/A | N/A | 137829 | 137848 | GCATAATATCCTACCAATGA | 28 | 1161 |
| 1480713 | N/A | N/A | 27089 | 27108 | GATGTGCCAACTTACCTAAC | 32 | 1162 |
| 1480716 | N/A | N/A | 73900 | 73919 | GTCAAAACCATCAACTTACT | 40 | 1163 |
| 1480742 | 3029 | 3048 | 202265 | 202284 | CAATGGCAATTCCATCATGA | 34 | 1164 |
| 1480785 | N/A | N/A | 93613 | 93632 | ACCATCACACCATATTCACT | 63 | 1165 |
| 1480791 | N/A | N/A | 205213 | 205232 | GTGTAAGACTCATTCAACAT | 37 | 1166 |
| 1480807 | N/A | N/A | 26917 | 26936 | GCTGCACTCCCTAAAAACAA | 23† | 1167 |
| 1480809 | 489 | 508 | 13193 | 13212 | TCGCAGCAGAATTCTTTCAA | 34 | 1168 |
| 1480850 | N/A | N/A | 63339 | 63358 | GAAACTTTCCCCGATCACCT | 23 | 1169 |
| 1480874 | N/A | N/A | 116357 | 116376 | TGTGTTTTACCTTTCCATCA | 9 | 1170 |
| 1480881 | N/A | N/A | 51375 | 51394 | AAGCAATTTAATCACCCACA | 42 | 1171 |
| 1480956 | 1792 | 1811 | 92564 | 92583 | CTTTAACTTCCGTCTCCCAA | 38 | 1172 |
| 1480974 | N/A | N/A | 161575 | 161594 | TCTGAGTCCTCCTGAAAATT | 76 | 1173 |
| 1480977 | N/A | N/A | 89633 | 89652 | AAGACACTATATTTTCACCT | 28 | 1174 |
| 1481013 | N/A | N/A | 60978 | 60997 | CGAGTAATTCATTCTCTCCT | 44 | 1175 |
| 1481014 | 923 | 942 | 20294 | 20313 | GAGTAGGTATACTTGCTGTC | 11 | 1176 |
| 1481022 | 2432 | 2451 | 126753 | 126772 | GTCTGTAATTTTCTACAATA | 6 | 1177 |
| 1481056 | N/A | N/A | 18660 | 18679 | GAGGAACTTCTATACATCTC | 13 | 1178 |
| 1481068 | N/A | N/A | 35805 | 35824 | GCAGTACACTCATCTCTTCC | 6 | 1179 |
| 1481142 | N/A | N/A | 71640 | 71659 | GTACTTTATCATAACCATAC | 8 | 1180 |
| 1481151 | 2680 | 2699 | 140789 | 140808 | TTCTCCCAGCAACACATCAA | 38 | 1181 |
| 1481231 | N/A | N/A | 110597 | 110616 | AGTCAAGATAACTACATCAA | 54 | 1182 |
| 1481262 | N/A | N/A | 146300 | 146319 | GCACCCATTCCATACCACAT | 35 | 1183 |
| 1481280 | N/A | N/A | 223044 | 223063 | ACACACAGTAACCATCCAAC | 27 | 1184 |
| 1481310 | N/A | N/A | 212941 | 212960 | TGCAGGAATATTTCATACCT | 77 | 1185 |
| 1481346 | N/A | N/A | 165761 | 165780 | GATACTCTAATTCTTGTCAT | 27 | 1186 |
| 1481370 | N/A | N/A | 123743 | 123762 | CTACCTTCCAACCTTTACCC | 41 | 1187 |
| 1481380 | N/A | N/A | 78614 | 78633 | CCAACCATACAGATTGATCT | 87 | 1188 |
| 1481381 | N/A | N/A | 135555 | 135574 | ACTGAATTTCCTACGGAAGC | 54 | 1189 |
| 1481384 | N/A | N/A | 152922 | 152941 | GCCTAATCATATACATATCA | 113 | 1190 |
| 1481404 | N/A | N/A | 169022 | 169041 | CATGATTATCCCATCTTGCA | 39 | 1191 |
| 1481426 | N/A | N/A | 3234 | 3253 | ACAAGCCCCCTCATCAGAAT | 56 | 1192 |
| 1481470 | 990 | 1009 | 20741 | 20760 | GTTTGCTTCACAACTCCCAC | 6 | 1193 |
| 1481540 | N/A | N/A | 104824 | 104843 | TTCACCTTTCACATACACCA | 48 | 1194 |
| 1481542 | N/A | N/A | 121368 | 121387 | CTAACAAGCCTCCTTTGGCT | 61 | 1195 |
| 1481571 | N/A | N/A | 129046 | 129065 | ATTGGAATCTCTTCCTGGTC | 37 | 1196 |
| 1481585 | 1429 | 1448 | 73461 | 73480 | TTCGACTCGAATTCTGTCAT | 58 | 1197 |
| 1481592 | 744 | 763 | 18181 | 18200 | ATGCTTTTGGACCGTTTGTT | 2 | 433 |
| 1481600 | N/A | N/A | 162855 | 162874 | TTCACTCATATTCCTAACAC | 43 | 1198 |
| 1481604 | N/A | N/A | 118238 | 118257 | GCAGCCACTTTTCTACTACA | 28 | 1199 |

TABLE 21
Reduction of MSH3 RNA by 5-10-5 MOE gapmers with mixed internucleoside linkages in A431 cells

| | SEQ ID | SEQ ID | SEQ ID | SEQ ID | | | |
|---|---|---|---|---|---|---|---|
| | NO: 1 | NO: 1 | NO: 2 | NO: 2 | | MSH3 | SEQ |
| Compound | Start | Stop | Start | Stop | | (% | ID |
| Number | Site | Site | Site | Site | Sequence (5′ to 3′) | UTC) | No. |
| 1479849 | N/A | N/A | 3136 | 3155 | AAGTACTAAAACCTCAGCGC | 80 | 1200 |
| 1479914 | N/A | N/A | 116259 | 116278 | ATGTAACACTTTTAGGGTCC | 16 | 1201 |
| 1479974 | 3754 | 3773 | 224122 | 224141 | ATATTCTGCCACTTAAGGCT | 75 | 1202 |
| 1480082 | N/A | N/A | 165415 | 165434 | TTTGCAGTATCACCTGTACT | 50 | 1203 |
| 1480087 | 2778 | 2797 | 161626 | 161645 | ATGTAGGAGCTCTTTCCACC | 20 | 1204 |
| 1480161 | 989 | 1008 | 20740 | 20759 | TTTGCTTCACAACTCCCACC | 18 | 1205 |
| 1480191 | N/A | N/A | 146103 | 146122 | GACTCATTTTCTTCCCACCC | 26 | 1206 |
| 1480205 | N/A | N/A | 73896 | 73915 | AAACCATCAACTTACTAGCT | 73 | 1207 |
| 1480207 | N/A | N/A | 51222 | 51241 | GGGCACTAATCACTTTATCA | 17 | 1208 |
| 1480247 | N/A | N/A | 107952 | 107971 | CTTCTATACTAACTTCAGGC | 34 | 1209 |
| 1480264 | N/A | N/A | 63336 | 63355 | ACTTTCCCCGATCACCTGGT | 66 | 1210 |
| 1480270 | N/A | N/A | 26915 | 26934 | TGCACTCCCTAAAAACAAAT | 52† | 1211 |
| 1480281 | N/A | N/A | 200502 | 200521 | GCTTCAGAATCACAATGGTT | 59 | 1212 |
| 1480332 | N/A | N/A | 17936 | 17955 | GGCAAACTATCCATAGGTTA | 16 | 1213 |
| 1480351 | 3027 | 3046 | 202263 | 202282 | ATGGCAATTCCATCATGAGT | 25 | 1214 |
| 1480373 | N/A | N/A | 21767 | 21786 | GCATCAAATAACACACTGCA | 35 | 1215 |
| 1480394 | N/A | N/A | 162616 | 162635 | CAGATCTGTTTTTATCTGCT | 50 | 1216 |
| 1480417 | N/A | N/A | 78353 | 78372 | GCATGTCTTCACTTATTCTC | 26 | 1217 |
| 1480438 | N/A | N/A | 118237 | 118256 | CAGCCACTTTTCTACTACAT | 80 | 1218 |
| 1480444 | N/A | N/A | 60977 | 60996 | GAGTAATTCATTCTCTCCTC | 43 | 1219 |
| 1480514 | 3300 | 3319 | 221205 | 221224 | CCAGGAACATCTGCTAGTTT | 53 | 1220 |
| 1480523 | 2303 | 2322 | 116973 | 116992 | ATACTGTCACATATTGTGCA | 67 | 1221 |
| 1480561 | N/A | N/A | 204949 | 204968 | GCAACGATATCCTTTCTTAC | 30 | 1222 |
| 1480566 | N/A | N/A | 174349 | 174368 | GCAAATATCTCATTCTGCTA | 69 | 1223 |
| 1480572 | N/A | N/A | 3428 | 3447 | CTGCACAATATGACTGCTTT | 56 | 1224 |
| 1480578 | 414 | 433 | 4507 | 4526 | TTGCCAGACATTCCCAGATC | 46 | 1225 |
| 1480581 | N/A | N/A | 89630 | 89649 | ACACTATATTTTCACCTGTA | 26 | 1226 |
| 1480583 | N/A | N/A | 82063 | 82082 | TTTTAGGTATCCATTCTTCA | 62 | 1227 |
| 1480598 | 2679 | 2698 | 140788 | 140807 | TCTCCCAGCAACACATCAAT | 44 | 1228 |
| 1480617 | N/A | N/A | 35804 | 35823 | CAGTACACTCATCTCTTCCC | 24 | 1229 |
| 1480639 | 3255 | 3274 | 221160 | 221179 | GCTGCAATTCCTCTAGTTAT | 37 | 1230 |
| 1480667 | N/A | N/A | 71607 | 71626 | CCTCAATGTTACACTATTTC | 24 | 1231 |
| 1480695 | N/A | N/A | 168775 | 168794 | GTGTATTAATAATTTATCCT | 38 | 1232 |
| 1480698 | 3844 | 3863 | 224212 | 224231 | GCCAGATTCACCCAGTTGCC | 25 | 1233 |
| 1480710 | N/A | N/A | 3332 | 3351 | AGTCACCCAATCCAGCACTT | 50 | 1234 |
| 1480723 | N/A | N/A | 141113 | 141132 | ATTCCAACTCTATTTGCATA | 54 | 1235 |
| 1480745 | N/A | N/A | 37067 | 37086 | GTGACCACACTTCCTGGAAT | 32 | 1236 |
| 1480774 | N/A | N/A | 161570 | 161589 | GTCCTCCTGAAAATTAGAAA | 92 | 1237 |
| 1480821 | N/A | N/A | 137775 | 137794 | GTAACCACATTTCTGAACTT | 61 | 1238 |
| 1480833 | N/A | N/A | 152873 | 152892 | GAGTATCATTCACTATTGCC | 35 | 1239 |
| 1480883 | N/A | N/A | 139203 | 139222 | GAGTACCTTTATTTCTACAT | 23 | 1240 |
| 1480891 | N/A | N/A | 13356 | 13375 | GCAGTTACATACCTTTTGAT | 57 | 1241 |
| 1480903 | 1169 | 1188 | 23044 | 23063 | ACAGAAGATAGCTGGTAGAA | 8 | 1242 |
| 1480911 | 1897 | 1916 | 109599 | 109618 | TTCTATCTGACCAAACACAC | 34 | 1243 |
| 1480912 | 488 | 507 | 13192 | 13211 | CGCAGCAGAATTCTTTCAAT | 30 | 1244 |
| 1480940 | N/A | N/A | 121129 | 121148 | GATGCATAATGACTAACACA | 14 | 1245 |
| 1480943 | 3606 | 3625 | 223974 | 223993 | CCAATAGGAATATACCATGG | 53 | 1246 |
| 1480945 | N/A | N/A | 104823 | 104842 | TCACCTTTCACATACACCAT | 81 | 1247 |
| 1480955 | N/A | N/A | 88105 | 88124 | GCAGTAATTCAATATCCTTT | 6 | 1248 |
| 1480978 | N/A | N/A | 100512 | 100531 | AGCTGAAGTATCATTAACTC | 35 | 1249 |
| 1480987 | N/A | N/A | 184251 | 184270 | ACAACTTACTCAATCCACAT | 24 | 1250 |
| 1480993 | N/A | N/A | 3534 | 3553 | AAGGACTCCATGATTAGTCA | 107 | 1251 |
| 1481044 | N/A | N/A | 123742 | 123761 | TACCTTCCAACCTTTACCCA | 68 | 1252 |
| 1481071 | N/A | N/A | 222866 | 222885 | GTCTTCTAATAATTCTCTCA | 31 | 1253 |
| 1481089 | N/A | N/A | 3230 | 3249 | GCCCCCTCATCAGAATGGGA | 64 | 1254 |
| 1481102 | N/A | N/A | 64197 | 64216 | CTAGCATTTTTTATTAGTCA | 17 | 1255 |
| 1481153 | 1428 | 1447 | 73460 | 73479 | TCGACTCGAATTCTGTCATC | 36 | 1256 |
| 1481181 | 4361 | 4380 | 224729 | 224748 | AAACTGCTTAATCCTATGAC | 35 | 1257 |
| 1481196 | N/A | N/A | 126571 | 126590 | ACATTCTTTAATTATGGTCC | 14 | 1258 |
| 1481202 | 3147 | 3166 | 212879 | 212898 | TGGTAATTCCCCACCTGGTG | 49 | 1259 |
| 1481226 | 1559 | 1578 | 76876 | 76895 | TCACAGGCTTCTCTAAGTTA | 25 | 1260 |
| 1481304 | N/A | N/A | 178966 | 178985 | CTCTCATATAATCCTTCCTT | 7 | 1261 |
| 1481314 | N/A | N/A | 11649 | 11668 | TCACCTTGTTTACTATTACT | 27 | 1262 |
| 1481345 | N/A | N/A | 27088 | 27107 | ATGTGCCAACTTACCTAACA | 38 | 1263 |
| 1481357 | N/A | N/A | 114688 | 114707 | CATGCATCTAATTTCTCTCC | 24 | 1264 |
| 1481393 | N/A | N/A | 93612 | 93631 | CCATCACACCATATTCACTC | 38 | 1265 |
| 1481408 | 921 | 940 | 20292 | 20311 | GTAGGTATACTTGCTGTCAT | 3 | 1266 |
| 1481441 | N/A | N/A | 135476 | 135495 | AAGCAATCACTTTATCAGCT | 55 | 1267 |
| 1481469 | N/A | N/A | 212938 | 212957 | AGGAATATTTCATACCTGGA | 60 | 1268 |
| 1481472 | 2904 | 2923 | 202140 | 202159 | CCTTTATATATATTGTCTGC | 21 | 1269 |
| 1481475 | N/A | N/A | 110483 | 110502 | TGAGCATCATCATATTAGCC | 38 | 1270 |
| 1481488 | N/A | N/A | 18659 | 18678 | AGGAACTTCTATACATCTCA | 23 | 1271 |
| 1481513 | 831 | 850 | 18268 | 18287 | CTATACTTATATCCACATTC | 19 | 1272 |
| 1481515 | N/A | N/A | 44758 | 44777 | GTTCATTTATACATAGAGCA | 17 | 1273 |
| 1481520 | N/A | N/A | 3504 | 3523 | ATCCTAAGAAACTTTATCCA | 127 | 1274 |
| 1481551 | N/A | N/A | 128420 | 128439 | TAACTTCTTATTTCTGCATC | 72 | 1275 |
| 1481560 | 1790 | 1809 | 92562 | 92581 | TTAACTTCCGTCTCCCAAAT | 34 | 1276 |
| 1481592 | 744 | 763 | 18181 | 18200 | ATGCTTTTGGACCGTTTGTT | 2 | 433 |

TABLE 22
Reduction of MSH3 RNA by 5-10-5 MOE gapmers with mixed internucleoside linkages in A431 cells

| | SEQ ID | SEQ ID | SEQ ID | SEQ ID | | | |
|---|---|---|---|---|---|---|---|
| | NO: 1 | NO: 1 | NO: 2 | NO: 2 | | MSH3 | SEQ |
| Compound | Start | Stop | Start | Stop | | (% | ID |
| Number | Site | Site | Site | Site | Sequence (5′ to 3′) | UTC) | No. |
| 1479879 | N/A | N/A | 140990 | 141009 | TAGCACCAATTCCACATTTC | 42 | 1277 |
| 1479887 | N/A | N/A | 64124 | 64143 | CTACCAGCTACTCTTATGGC | 49 | 1278 |
| 1479911 | N/A | N/A | 183939 | 183958 | ACTGTCACATAACCTCCACA | 53 | 1279 |
| 1479957 | 988 | 1007 | 20739 | 20758 | TTGCTTCACAACTCCCACCT | 9 | 1280 |
| 1479977 | N/A | N/A | 89629 | 89648 | CACTATATTTTCACCTGTAC | 35 | 1281 |
| 1480007 | 1427 | 1446 | 73459 | 73478 | CGACTCGAATTCTGTCATCC | 29 | 1282 |
| 1480096 | N/A | N/A | 11645 | 11664 | CTTGTTTACTATTACTCTCT | 10 | 1283 |
| 1480147 | 1167 | 1186 | 23042 | 23061 | AGAAGATAGCTGGTAGAAGT | 27 | 1284 |
| 1480150 | N/A | N/A | 135475 | 135494 | AGCAATCACTTTATCAGCTA | 107 | 1285 |
| 1480155 | N/A | N/A | 113803 | 113822 | AGAGGATATATACTCCACCA | 34 | 1286 |
| 1480158 | N/A | N/A | 35603 | 35622 | CAGACCTCATATCATTTCCA | 15 | 1287 |
| 1480159 | N/A | N/A | 43711 | 43730 | CAGCAATTACACACATGCTT | 63 | 1288 |
| 1480197 | N/A | N/A | 161727 | 161746 | CTTACCTTGTGAAAATGCCA | 27 | 1289 |
| 1480218 | 828 | 847 | 18265 | 18284 | TACTTATATCCACATTCCAC | 9 | 1290 |
| 1480219 | 3254 | 3273 | 221159 | 221178 | CTGCAATTCCTCTAGTTATT | 23 | 1291 |
| 1480261 | 2893 | 2912 | 202129 | 202148 | ATTGTCTGCAGCACCCATCC | 21 | 1292 |
| 1480293 | N/A | N/A | 63334 | 63353 | TTTCCCCGATCACCTGGTGT | 60 | 1293 |
| 1480339 | 3843 | 3862 | 224211 | 224230 | CCAGATTCACCCAGTTGCCA | 25 | 1294 |
| 1480340 | N/A | N/A | 178939 | 178958 | TTGCAATAAGATCACACTAC | 28 | 1295 |
| 1480429 | N/A | N/A | 168574 | 168593 | GTCAACACATCTTATTTATA | 14 | 1296 |
| 1480453 | N/A | N/A | 118234 | 118253 | CCACTTTTCTACTACATATC | 152 | 1297 |
| 1480465 | N/A | N/A | 3331 | 3350 | GTCACCCAATCCAGCACTTT | 54 | 1298 |
| 1480471 | N/A | N/A | 82060 | 82079 | TAGGTATCCATTCTTCAGTT | 12 | 1299 |
| 1480483 | 487 | 506 | 13191 | 13210 | GCAGCAGAATTCTTTCAATT | 21 | 1300 |
| 1480494 | 919 | 938 | 20290 | 20309 | AGGTATACTTGCTGTCATAA | 1 | 1301 |
| 1480508 | N/A | N/A | 2964 | 2983 | AGTCCCAGACAGAACCTACT | 50 | 1302 |
| 1480511 | N/A | N/A | 3200 | 3219 | CTGAGTTCCTGTCTCAGGCC | 140 | 1303 |
| 1480556 | N/A | N/A | 51207 | 51226 | TATCAAGTACTTCCTCAACT | 36 | 1304 |
| 1480573 | N/A | N/A | 3533 | 3552 | AGGACTCCATGATTAGTCAC | 74 | 1305 |
| 1480579 | N/A | N/A | 199997 | 200016 | TAAGCATTATACTTAAGTGC | 61 | 1306 |
| 1480582 | N/A | N/A | 27085 | 27104 | TGCCAACTTACCTAACAGAT | 60 | 1307 |
| 1480607 | 3753 | 3772 | 224121 | 224140 | TATTCTGCCACTTAAGGCTT | 66 | 1308 |
| 1480630 | N/A | N/A | 165228 | 165247 | GTTGACCACTACTTTTCTTC | 27 | 1309 |
| 1480637 | 3604 | 3623 | 223972 | 223991 | AATAGGAATATACCATGGTC | 16 | 1310 |
| 1480660 | N/A | N/A | 107951 | 107970 | TTCTATACTAACTTCAGGCC | 25 | 1311 |
| 1480664 | 1558 | 1577 | 76875 | 76894 | CACAGGCTTCTCTAAGTTAA | 32 | 1312 |
| 1480690 | N/A | N/A | 222685 | 222704 | CTTGCATATATTTCTACAGC | 15 | 1313 |
| 1480749 | N/A | N/A | 60905 | 60924 | TGGCTTTAATATCTCCATAT | 11 | 1314 |
| 1480758 | 413 | 432 | 4506 | 4525 | TGCCAGACATTCCCAGATCA | 83 | 1315 |
| 1480771 | N/A | N/A | 71600 | 71619 | GTTACACTATTTCTAAGATT | 16 | 1316 |
| 1480882 | N/A | N/A | 104812 | 104831 | ATACACCATTCATTCTTACA | 39 | 1317 |
| 1480906 | N/A | N/A | 18569 | 18588 | TCATCCAATTAACTTTGGAT | 67 | 1318 |
| 1480930 | 1503 | 1522 | 73535 | 73554 | ACTGTATCTTTTGCATAAAA | 62 | 1319 |
| 1480962 | N/A | N/A | 93611 | 93630 | CATCACACCATATTCACTCT | 54 | 1320 |
| 1480970 | 1786 | 1805 | 92558 | 92577 | CTTCCGTCTCCCAAATGAAG | 37 | 1321 |
| 1481016 | N/A | N/A | 78349 | 78368 | GTCTTCACTTATTCTCTAAC | 13 | 1322 |
| 1481017 | 1896 | 1915 | 109598 | 109617 | TCTATCTGACCAAACACACT | 22 | 1323 |
| 1481036 | N/A | N/A | 121037 | 121056 | CCACAACTATTCAATCTGTA | 14 | 1324 |
| 1481048 | N/A | N/A | 139202 | 139221 | AGTACCTTTATTTCTACATC | 13 | 1325 |
| 1481049 | N/A | N/A | 126500 | 126519 | ATGCATTTCAAATTATACCC | 20 | 1326 |
| 1481062 | N/A | N/A | 126835 | 126854 | TTTTCATTGTAAACTCACTC | 58 | 1327 |
| 1481123 | N/A | N/A | 212937 | 212956 | GGAATATTTCATACCTGGAT | 68 | 1328 |
| 1481128 | 2286 | 2305 | 116956 | 116975 | GCAGAAGGATTTTTTAGTAT | 11 | 1329 |
| 1481150 | N/A | N/A | 3503 | 3522 | TCCTAAGAAACTTTATCCAC | 69 | 1330 |
| 1481156 | N/A | N/A | 37004 | 37023 | CCATGTTATTCATATCTATA | 3 | 1331 |
| 1481176 | N/A | N/A | 88098 | 88117 | TTCAATATCCTTTATCAGCC | 9 | 1332 |
| 1481193 | N/A | N/A | 21613 | 21632 | TACCACTATATTTTATAGGC | 6 | 1333 |
| 1481195 | 4360 | 4379 | 224728 | 224747 | AACTGCTTAATCCTATGACA | 44 | 1334 |
| 1481216 | 2777 | 2796 | 161625 | 161644 | TGTAGGAGCTCTTTCCACCC | 11 | 1335 |
| 1481224 | 3144 | 3163 | 212876 | 212895 | TAATTCCCCACCTGGTGTGA | 33 | 1336 |
| 1481254 | N/A | N/A | 145717 | 145736 | GTTCCATTAAAATACTATCA | 73 | 1337 |
| 1481316 | N/A | N/A | 204946 | 204965 | ACGATATCCTTTCTTACTGC | 35 | 1338 |
| 1481319 | 2678 | 2697 | 140787 | 140806 | CTCCCAGCAACACATCAATC | 60 | 1339 |
| 1481323 | N/A | N/A | 137763 | 137782 | CTGAACTTACTCATAACACC | 62 | 1340 |
| 1481355 | N/A | N/A | 161477 | 161496 | GCAAAACATTACTTTGTAGC | 40 | 1341 |
| 1481414 | N/A | N/A | 116246 | 116265 | AGGGTCCAATCACATTTCTA | 24 | 1342 |
| 1481425 | N/A | N/A | 100511 | 100530 | GCTGAAGTATCATTAACTCC | 33 | 1343 |
| 1481463 | N/A | N/A | 26914 | 26933 | GCACTCCCTAAAAACAAATA | 65† | 1344 |
| 1481467 | N/A | N/A | 152230 | 152249 | GCTCTACATAAACTAATGCA | 71 | 1345 |
| 1481509 | N/A | N/A | 17685 | 17704 | GGGCAAAACCACTTTGAGCA | 20 | 1346 |
| 1481517 | N/A | N/A | 13355 | 13374 | CAGTTACATACCTTTTGATT | 60 | 1347 |
| 1481548 | N/A | N/A | 110481 | 110500 | AGCATCATCATATTAGCCAA | 26 | 1348 |
| 1481552 | N/A | N/A | 3424 | 3443 | ACAATATGACTGCTTTTAAC | 54 | 1349 |
| 1481575 | 3025 | 3044 | 202261 | 202280 | GGCAATTCCATCATGAGTGC | 17 | 1350 |
| 1481583 | 3299 | 3318 | 221204 | 221223 | CAGGAACATCTGCTAGTTTA | 36 | 1351 |
| 1481584 | N/A | N/A | 123741 | 123760 | ACCTTCCAACCTTTACCCAA | 57 | 1352 |
| 1481592 | 744 | 763 | 18181 | 18200 | ATGCTTTTGGACCGTTTGTT | 2 | 433 |
| 1481609 | N/A | N/A | 174124 | 174143 | GTAGCATTTTTAACTAGCAC | 23 | 1353 |

TABLE 23
Reduction of MSH3 RNA by 5-10-5 MOE gapmers with mixed internucleoside linkages in A431 cells

| | SEQ ID | SEQ ID | SEQ ID | SEQ ID | | | |
|---|---|---|---|---|---|---|---|
| | NO: 1 | NO: 1 | NO: 2 | NO: 2 | | MSH3 | SEQ |
| Compound | Start | Stop | Start | Stop | | (% | ID |
| Number | Site | Site | Site | Site | Sequence (5′ to 3′) | UTC) | No. |
| 1479802 | 1895 | 1914 | 109597 | 109616 | CTATCTGACCAAACACACTA | 24 | 1354 |
| 1479806 | N/A | N/A | 63311 | 63330 | ATGGCTCTGCTCACTAGGAT | 15 | 1355 |
| 1479820 | N/A | N/A | 93607 | 93626 | ACACCATATTCACTCTGGTC | 54 | 1356 |
| 1479827 | N/A | N/A | 20737 | 20756 | GCTTCACAACTCCCACCTTC | 9 | 1357 |
| 1479845 | N/A | N/A | 3199 | 3218 | TGAGTTCCTGTCTCAGGCCT | 64 | 1358 |
| 1479850 | N/A | N/A | 126499 | 126518 | TGCATTTCAAATTATACCCA | 13 | 1359 |
| 1479895 | N/A | N/A | 89565 | 89584 | CGATTTATAATCAACTAGCC | 47 | 1360 |
| 1479917 | 2262 | 2281 | 116932 | 116951 | CGTATTTCTTGCAAATGCAT | 15 | 1361 |
| 1479940 | N/A | N/A | 178881 | 178900 | CTGCACATATAATCAAGCAA | 45 | 1362 |
| 1479962 | N/A | N/A | 135291 | 135310 | ATCACAGATTTCATCTGACC | 63 | 1363 |
| 1479987 | N/A | N/A | 161376 | 161395 | CACACAGCTATTCCTGGGTA | 45 | 1364 |
| 1480006 | N/A | N/A | 3530 | 3549 | ACTCCATGATTAGTCACATC | 43 | 1365 |
| 1480042 | N/A | N/A | 71599 | 71618 | TTACACTATTTCTAAGATTT | 38 | 1366 |
| 1480055 | 3116 | 3135 | 212848 | 212867 | TTTCTAGTTCACAAACTGGC | 28 | 1367 |
| 1480057 | N/A | N/A | 204945 | 204964 | CGATATCCTTTCTTACTGCT | 34 | 1368 |
| 1480065 | N/A | N/A | 27083 | 27102 | CCAACTTACCTAACAGATGT | 36 | 1369 |
| 1480185 | N/A | N/A | 81962 | 81981 | GACATCATATTTTCCTTGTC | 46 | 1370 |
| 1480259 | N/A | N/A | 220897 | 220916 | TAGGATCTATCTTTTAGTTC | 38 | 1371 |
| 1480266 | N/A | N/A | 183937 | 183956 | TGTCACATAACCTCCACAGT | 39 | 1372 |
| 1480384 | N/A | N/A | 137762 | 137781 | TGAACTTACTCATAACACCA | 49 | 1373 |
| 1480434 | 826 | 845 | 18263 | 18282 | CTTATATCCACATTCCACAC | 10 | 1374 |
| 1480442 | N/A | N/A | 3423 | 3442 | CAATATGACTGCTTTTAACC | 49 | 1375 |
| 1480456 | N/A | N/A | 100432 | 100451 | GACTTAGTTATTCTTATCTC | 18 | 1376 |
| 1480487 | N/A | N/A | 42160 | 42179 | AGGGTTTAATTTTACAGTAT | 2 | 1377 |
| 1480495 | N/A | N/A | 18390 | 18409 | ATCAGCTTTTATATAAGGTC | 8 | 1378 |
| 1480496 | N/A | N/A | 17635 | 17654 | TGTTTTATACTTCCAAGCAC | 23 | 1379 |
| 1480548 | N/A | N/A | 13354 | 13373 | AGTTACATACCTTTTGATTA | 126 | 1380 |
| 1480574 | 1496 | 1515 | 73528 | 73547 | CTTTTGCATAAAACTCTGTA | 81 | 1381 |
| 1480584 | 3752 | 3771 | 224120 | 224139 | ATTCTGCCACTTAAGGCTTT | 116 | 1382 |
| 1480591 | 3602 | 3621 | 223970 | 223989 | TAGGAATATACCATGGTCAT | 13 | 1383 |
| 1480627 | N/A | N/A | 126834 | 126853 | TTTCATTGTAAACTCACTCT | 41 | 1384 |
| 1480665 | 909 | 928 | 20280 | 20299 | GCTGTCATAAAGTTGTGATC | 7 | 1385 |
| 1480666 | 1557 | 1576 | 76874 | 76893 | ACAGGCTTCTCTAAGTTAAC | 17 | 1386 |
| 1480685 | N/A | N/A | 78347 | 78366 | CTTCACTTATTCTCTAACTA | 41 | 1387 |
| 1480686 | N/A | N/A | 168518 | 168537 | ACTGCACATCTACTTAGTAC | 44 | 1388 |
| 1480754 | N/A | N/A | 199637 | 199656 | TGGCTTTACATATATGTCAT | 56 | 1389 |
| 1480792 | N/A | N/A | 110448 | 110467 | GTTGCAGCATTTTATATATA | 22 | 1390 |
| 1480797 | N/A | N/A | 165227 | 165246 | TTGACCACTACTTTTCTTCT | 45 | 1391 |
| 1480835 | N/A | N/A | 2963 | 2982 | GTCCCAGACAGAACCTACTA | 77 | 1392 |
| 1480870 | N/A | N/A | 63371 | 63390 | CCTCAGGTCTCCATTCAAGT | 30 | 1393 |
| 1480887 | N/A | N/A | 150021 | 150040 | GTACTAACAACCATTTGTTC | 47 | 1394 |
| 1480897 | 1782 | 1801 | 92554 | 92573 | CGTCTCCCAAATGAAGTTTT | 14 | 1395 |
| 1480914 | N/A | N/A | 202127 | 202146 | TGTCTGCAGCACCCATCCTA | 42 | 1396 |
| 1480941 | N/A | N/A | 144510 | 144529 | CGTAAGTTCTTTCTCAACAC | 21 | 1397 |
| 1480950 | N/A | N/A | 87460 | 87479 | GGTCTACAAATATCTGCCAT | 57 | 1398 |
| 1480989 | N/A | N/A | 60438 | 60457 | ATCAAATCTTATTACCAGGA | 2 | 1399 |
| 1480990 | 3290 | 3309 | 221195 | 221214 | CTGCTAGTTTAGCCACATTT | 47 | 1400 |
| 1481007 | N/A | N/A | 123740 | 123759 | CCTTCCAACCTTTACCCAAT | 28 | 1401 |
| 1481010 | 2677 | 2696 | 140786 | 140805 | TCCCAGCAACACATCAATCA | 50 | 1402 |
| 1481034 | N/A | N/A | 26458 | 26477 | GTAACCAGACCACCAGTACT | 60 | 1403 |
| 1481042 | N/A | N/A | 3330 | 3349 | TCACCCAATCCAGCACTTTT | 81 | 1404 |
| 1481055 | N/A | N/A | 37000 | 37019 | GTTATTCATATCTATATGCT | 7 | 1405 |
| 1481101 | N/A | N/A | 140857 | 140876 | CATCGACTTATTTTTTGGCA | 31 | 1406 |
| 1481110 | N/A | N/A | 174123 | 174142 | TAGCATTTTTAACTAGCACC | 31 | 1407 |
| 1481121 | 4359 | 4378 | 224727 | 224746 | ACTGCTTAATCCTATGACAA | 49 | 1408 |
| 1481243 | N/A | N/A | 222498 | 222517 | TTCTCATAGATACTTTTCCC | 26 | 1409 |
| 1481249 | 2875 | 2894 | 161723 | 161742 | CCTTGTGAAAATGCCATCCA | 39 | 1410 |
| 1481253 | 2776 | 2795 | 161624 | 161643 | GTAGGAGCTCTTTCCACCCA | 14 | 1411 |
| 1481271 | 412 | 431 | 4505 | 4524 | GCCAGACATTCCCAGATCAC | 29 | 1412 |
| 1481272 | N/A | N/A | 120606 | 120625 | ATAGCAACTTTTCCTGGTCT | 14 | 1413 |
| 1481288 | N/A | N/A | 112708 | 112727 | TGTGACTAGCACTATTTACA | 43 | 1414 |
| 1481302 | 3024 | 3043 | 202260 | 202279 | GCAATTCCATCATGAGTGCT | 105 | 1415 |
| 1481341 | 468 | 487 | 13172 | 13191 | TTTTCCAGAGACTTTGAAAC | 48 | 1416 |
| 1481349 | N/A | N/A | 118028 | 118047 | TTCTGTTATATAGAGCTCTA | 18 | 1417 |
| 1481382 | 3842 | 3861 | 224210 | 224229 | CAGATTCACCCAGTTGCCAA | 21 | 1418 |
| 1481391 | N/A | N/A | 11262 | 11281 | CTAGTTTTACCCATTGCAGT | 45 | 1419 |
| 1481419 | N/A | N/A | 107605 | 107624 | CTTGCTATTAATCTTAGGTT | 29 | 1420 |
| 1481449 | N/A | N/A | 21612 | 21631 | ACCACTATATTTTATAGGCA | 1 | 1421 |
| 1481473 | N/A | N/A | 35090 | 35109 | TTAGATTACTATCATCTCTA | 16 | 1422 |
| 1481537 | 1159 | 1178 | 23034 | 23053 | GCTGGTAGAAGTATCAGTCA | 42 | 1423 |
| 1481539 | N/A | N/A | 139191 | 139210 | TTCTACATCATCTATATCCT | 33 | 1424 |
| 1481567 | N/A | N/A | 51141 | 51160 | CCTGTCATTTATTATGGACA | 35 | 1425 |
| 1481592 | 744 | 763 | 18181 | 18200 | ATGCTTTTGGACCGTTTGTT | 3 | 433 |
| 1481593 | 2142 | 2161 | 116098 | 116117 | GCAGCTTGTTCATTGAGTAT | 26 | 1426 |
| 1481602 | N/A | N/A | 212936 | 212955 | GAATATTTCATACCTGGATC | 67 | 1427 |
| 1481603 | 1423 | 1442 | 73455 | 73474 | TCGAATTCTGTCATCCTGCA | 6 | 1428 |
| 1481614 | N/A | N/A | 104273 | 104292 | TCTTGTTTAACCCATATCCT | 47 | 1429 |
| 1481637 | N/A | N/A | 3502 | 3521 | CCTAAGAAACTTTATCCACC | 75 | 1430 |

TABLE 24
Reduction of MSH3 RNA by 5-10-5 MOE gapmers with mixed internucleoside linkages in A431 cells

| | SEQ ID | SEQ ID | SEQ ID | SEQ ID | | | |
|---|---|---|---|---|---|---|---|
| | NO: 1 | NO: 1 | NO: 2 | NO: 2 | | MSH3 | SEQ |
| Compound | Start | Stop | Start | Stop | | (% | ID |
| Number | Site | Site | Site | Site | Sequence (5′ to 3′) | UTC) | No. |
| 1479805 | N/A | N/A | 212935 | 212954 | AATATTTCATACCTGGATCC | 104 | 1431 |
| 1479840 | N/A | N/A | 204931 | 204950 | ACTGCTTTTTCAACACTGTA | 52 | 1432 |
| 1479861 | N/A | N/A | 93097 | 93116 | CCAACTTTACTCACTCTACT | 47 | 1433 |
| 1479881 | N/A | N/A | 78346 | 78365 | TTCACTTATTCTCTAACTAC | 120 | 1434 |
| 1479896 | N/A | N/A | 26438 | 26457 | GTAGTAAATTACTACTTCAT | 56 | 1435 |
| 1479901 | N/A | N/A | 21611 | 21630 | CCACTATATTTTATAGGCAT | 4 | 1436 |
| 1479915 | N/A | N/A | 36963 | 36982 | CCATTCCACATTTACTTGGC | 9 | 1437 |
| 1479926 | N/A | N/A | 63301 | 63320 | TCACTAGGATCCATGAGGAT | 73 | 1438 |
| 1479933 | 3004 | 3023 | 202240 | 202259 | CGTCCCTCTTCCTAGTTCAT | 56 | 1439 |
| 1479934 | 1552 | 1571 | 76869 | 76888 | CTTCTCTAAGTTAACAATGC | 23 | 1440 |
| 1479950 | N/A | N/A | 220896 | 220915 | AGGATCTATCTTTTAGTTCA | 47 | 1441 |
| 1480014 | 3745 | 3764 | 224113 | 224132 | CACTTAAGGCTTTACTGGAC | 87 | 1442 |
| 1480015 | N/A | N/A | 59067 | 59086 | CTACACTTTTGATTATACCT | 32 | 1443 |
| 1480032 | 465 | 484 | 13169 | 13188 | TCCAGAGACTTTGAAACATT | 18 | 1444 |
| 1480040 | N/A | N/A | 3186 | 3205 | CAGGCCTGCCATTAAAAACC | 77 | 1445 |
| 1480044 | 1494 | 1513 | 73526 | 73545 | TTTGCATAAAACTCTGTAAC | 79 | 18 |
| 1480069 | 2870 | 2889 | 161718 | 161737 | TGAAAATGCCATCCACAATC | 64 | 1446 |
| 1480078 | N/A | N/A | 2962 | 2981 | TCCCAGACAGAACCTACTAT | 105 | 1447 |
| 1480115 | 2256 | 2275 | 116926 | 116945 | TCTTGCAAATGCATTCGGAT | 15 | 1448 |
| 1480131 | 3592 | 3611 | 223960 | 223979 | CCATGGTCATAATTTTATGC | 77 | 1449 |
| 1480208 | N/A | N/A | 149572 | 149591 | GACAGATTTTTTCCAGCCCC | 85 | 1450 |
| 1480322 | N/A | N/A | 100328 | 100347 | GACATTTTCTTTCTACTCCC | 27 | 1451 |
| 1480347 | N/A | N/A | 13353 | 13372 | GTTACATACCTTTTGATTAA | 148 | 1452 |
| 1480400 | N/A | N/A | 11247 | 11266 | GCAGTCATTCACTAATCAGA | 12 | 1453 |
| 1480401 | 2775 | 2794 | 161623 | 161642 | TAGGAGCTCTTTCCACCCAT | 36 | 1454 |
| 1480419 | N/A | N/A | 27080 | 27099 | ACTTACCTAACAGATGTGGC | 82 | 1455 |
| 1480455 | N/A | N/A | 107604 | 107623 | TTGCTATTAATCTTAGGTTC | 36 | 1456 |
| 1480490 | 899 | 918 | 20270 | 20289 | AGTTGTGATCTAAATGGCAA | 8 | 1457 |
| 1480530 | N/A | N/A | 144508 | 144527 | TAAGTTCTTTCTCAACACTA | 49 | 1458 |
| 1480569 | N/A | N/A | 63370 | 63389 | CTCAGGTCTCCATTCAAGTC | 28 | 1459 |
| 1480676 | N/A | N/A | 165069 | 165088 | GTCTCAGAACATTAATCTTC | 52 | 1460 |
| 1480681 | N/A | N/A | 3501 | 3520 | CTAAGAAACTTTATCCACCC | 60 | 1461 |
| 1480684 | N/A | N/A | 81743 | 81762 | GCATTGATTTGAATTTACCT | 13 | 1462 |
| 1480702 | 3834 | 3853 | 224202 | 224221 | CCCAGTTGCCAATTATCTGA | 53 | 1463 |
| 1480714 | N/A | N/A | 202125 | 202144 | TCTGCAGCACCCATCCTACA | 68 | 1464 |
| 1480715 | N/A | N/A | 178793 | 178812 | ATTCTAAATTTCTACAGGCT | 59 | 1465 |
| 1480767 | 3287 | 3306 | 221192 | 221211 | CTAGTTTAGCCACATTTAAT | 42 | 1466 |
| 1480777 | N/A | N/A | 168472 | 168491 | GAACAAGCACAATTTCTGTC | 40 | 1467 |
| 1480813 | N/A | N/A | 17602 | 17621 | GCACATTCTATAAATTCTTA | 29 | 1468 |
| 1480816 | 1422 | 1441 | 73454 | 73473 | CGAATTCTGTCATCCTGCAC | 28 | 1469 |
| 1480823 | N/A | N/A | 126833 | 126852 | TTCATTGTAAACTCACTCTA | 109 | 1470 |
| 1480884 | N/A | N/A | 183936 | 183955 | GTCACATAACCTCCACAGTA | 60 | 1471 |
| 1480892 | 816 | 835 | 18253 | 18272 | CATTCCACACACAAAACTGC | 42 | 1472 |
| 1480934 | N/A | N/A | 103726 | 103745 | CCAATCCTTTTGATTACCAA | 33 | 1473 |
| 1480953 | N/A | N/A | 135290 | 135309 | TCACAGATTTCATCTGACCC | 73 | 1474 |
| 1480994 | N/A | N/A | 3328 | 3347 | ACCCAATCCAGCACTTTTTT | 70 | 1475 |
| 1481040 | N/A | N/A | 140856 | 140875 | ATCGACTTATTTTTTGGCAT | 30 | 1476 |
| 1481075 | 2379 | 2398 | 123739 | 123758 | CTTCCAACCTTTACCCAATC | 40 | 1477 |
| 1481087 | 2676 | 2695 | 140785 | 140804 | CCCAGCAACACATCAATCAC | 66 | 1478 |
| 1481148 | N/A | N/A | 125750 | 125769 | TGTTGCACTTTAATTTGCCA | 16 | 1479 |
| 1481182 | N/A | N/A | 173314 | 173333 | AAGCATACCAAATACTTCCA | 54 | 1480 |
| 1481187 | N/A | N/A | 42007 | 42026 | CATTTGCTACTCTCTCCATA | 35 | 1481 |
| 1481220 | N/A | N/A | 3420 | 3439 | TATGACTGCTTTTAACCGTA | 77 | 1482 |
| 1481225 | N/A | N/A | 71475 | 71494 | CCAGAATTTATCTTTGTGGA | 15 | 1483 |
| 1481244 | N/A | N/A | 222497 | 222516 | TCTCATAGATACTTTTCCCT | 36 | 1484 |
| 1481246 | N/A | N/A | 161375 | 161394 | ACACAGCTATTCCTGGGTAT | 104 | 1485 |
| 1481258 | N/A | N/A | 49321 | 49340 | AGGATAACTACACTTTCTTC | 69 | 1486 |
| 1481283 | N/A | N/A | 120543 | 120562 | GCCTTGATTCATTATAAGCA | 114 | 1487 |
| 1481309 | N/A | N/A | 18389 | 18408 | TCAGCTTTTATATAAGGTCA | 17 | 1488 |
| 1481324 | 4356 | 4375 | 224724 | 224743 | GCTTAATCCTATGACAATAT | 22 | 1489 |
| 1481330 | N/A | N/A | 34790 | 34809 | GCTGTTTTTACCTTTAGGTA | 2 | 1490 |
| 1481343 | N/A | N/A | 112323 | 112342 | CTTGAGATCCTCTATCATTA | 79 | 1491 |
| 1481358 | N/A | N/A | 118026 | 118045 | CTGTTATATAGAGCTCTATG | 14 | 1492 |
| 1481369 | N/A | N/A | 139187 | 139206 | ACATCATCTATATCCTTTCA | 46 | 1493 |
| 1481371 | N/A | N/A | 86630 | 86649 | GTGTAAGACATAATTTTTCA | 8 | 1494 |
| 1481430 | 1158 | 1177 | 23033 | 23052 | CTGGTAGAAGTATCAGTCAT | 20 | 1495 |
| 1481442 | 1891 | 1910 | 109593 | 109612 | CTGACCAAACACACTAGATT | 19 | 1496 |
| 1481443 | 2133 | 2152 | 116089 | 116108 | TCATTGAGTATCTTTAAGTA | 73 | 1497 |
| 1481466 | N/A | N/A | 137094 | 137113 | GAAGATTTTCACTTTGGAAC | 40 | 1498 |
| 1481485 | 3113 | 3132 | 212845 | 212864 | CTAGTTCACAAACTGGCGGA | 76 | 1499 |
| 1481493 | 411 | 430 | 4504 | 4523 | CCAGACATTCCCAGATCACT | 30 | 1500 |
| 1481530 | N/A | N/A | 20736 | 20755 | CTTCACAACTCCCACCTTCA | 44 | 1501 |
| 1481565 | 1733 | 1752 | 92505 | 92524 | CTTTGGTTTTCATATCAGTC | 19 | 1502 |
| 1481581 | N/A | N/A | 198903 | 198922 | TCCTTGCTATTATAATAACT | 134 | 1503 |
| 1481587 | 1763 | 1782 | 92535 | 92554 | TAGTGTGGTCTAAAACCCAC | 92 | 1504 |
| 1481592 | 744 | 763 | 18181 | 18200 | ATGCTTTTGGACCGTTTGTT | 2 | 433 |
| 1481621 | N/A | N/A | 3526 | 3545 | CATGATTAGTCACATCTATA | 67 | 1505 |
| 1481646 | N/A | N/A | 110123 | 110142 | TAATCCTTTACTCACCTTCA | 89 | 1506 |

TABLE 25
Reduction of MSH3 RNA by 5-10-5 MOE gapmers with mixed internucleoside linkages in A431 cells

| | SEQ ID | SEQ ID | SEQ ID | SEQ ID | | | |
|---|---|---|---|---|---|---|---|
| | NO: 1 | NO: 1 | NO: 2 | NO: 2 | | MSH3 | SEQ |
| Compound | Start | Stop | Start | Stop | | (% | ID |
| Number | Site | Site | Site | Site | Sequence (5′ to 3′) | UTC) | No. |
| 1479854 | 2772 | 2791 | 161620 | 161639 | GAGCTCTTTCCACCCATGTT | 77 | 1507 |
| 1479869 | N/A | N/A | 63256 | 63275 | GCTGTATTCAATGCCTGGAA | 11 | 1508 |
| 1479905 | N/A | N/A | 183439 | 183458 | CCGCTTATTCAATCTGCCTT | 35 | 1509 |
| 1479935 | N/A | N/A | 140840 | 140859 | GCATAAGGTACTTACTGATA | 93 | 1510 |
| 1479941 | 410 | 429 | 4503 | 4522 | CAGACATTCCCAGATCACTT | 40 | 1511 |
| 1479988 | N/A | N/A | 33566 | 33585 | TGGTAAGACTTTCCCAGACT | 11 | 1512 |
| 1480003 | 1157 | 1176 | 23032 | 23051 | TGGTAGAAGTATCAGTCATT | 2 | 1513 |
| 1480008 | N/A | N/A | 178674 | 178693 | TGGGCAACTCATCCTCTAAC | 66 | 1514 |
| 1480022 | 2378 | 2397 | 123738 | 123757 | TTCCAACCTTTACCCAATCA | 37 | 1515 |
| 1480041 | 3833 | 3852 | 224201 | 224220 | CCAGTTGCCAATTATCTGAA | 52 | 1516 |
| 1480052 | N/A | N/A | 161282 | 161301 | GCATATTCTCCCTATTGCTT | 65 | 1517 |
| 1480088 | 1762 | 1781 | 92534 | 92553 | AGTGTGGTCTAAAACCCACA | 99 | 1518 |
| 1480098 | N/A | N/A | 202122 | 202141 | GCAGCACCCATCCTACAAGC | 125 | 1519 |
| 1480133 | N/A | N/A | 41993 | 42012 | TCCATATGCCAATTCCATAC | 9 | 1520 |
| 1480163 | N/A | N/A | 59060 | 59079 | TTTGATTATACCTTTGCTTC | 14 | 1521 |
| 1480166 | 464 | 483 | 13168 | 13187 | CCAGAGACTTTGAAACATTC | 5 | 1522 |
| 1480171 | N/A | N/A | 222496 | 222515 | CTCATAGATACTTTTCCCTC | 31 | 1523 |
| 1480202 | N/A | N/A | 36962 | 36981 | CATTCCACATTTACTTGGCT | 7 | 1524 |
| 1480212 | N/A | N/A | 218687 | 218706 | GCAGCAGACAGATAAGAGCT | 66 | 1525 |
| 1480240 | 4350 | 4369 | 224718 | 224737 | TCCTATGACAATATTTAACC | 47 | 1526 |
| 1480244 | 2132 | 2151 | 116088 | 116107 | CATTGAGTATCTTTAAGTAA | 47 | 1527 |
| 1480252 | 2866 | 2885 | 161714 | 161733 | AATGCCATCCACAATCCCAA | 57 | 1528 |
| 1480268 | N/A | N/A | 9870 | 9889 | AAGGGCTATTATTCTCTACC | 15 | 1529 |
| 1480284 | N/A | N/A | 3181 | 3200 | CTGCCATTAAAAACCTGCAT | 98 | 1530 |
| 1480297 | N/A | N/A | 144436 | 144455 | ACAGTTCTATATCAACTCCT | 42 | 1531 |
| 1480344 | N/A | N/A | 81342 | 81361 | GTGTTAACTCATATCAGGTC | 10 | 1532 |
| 1480366 | 886 | 905 | 20257 | 20276 | ATGGCAATAAATATTGAGCT | 2 | 1533 |
| 1480383 | N/A | N/A | 17572 | 17591 | GAACCATGATTCTCTTGGTA | 71 | 1534 |
| 1480393 | N/A | N/A | 78250 | 78269 | TCAGCAACTTTATTTTTGGC | 11 | 1535 |
| 1480430 | N/A | N/A | 3500 | 3519 | TAAGAAACTTTATCCACCCA | 62 | 1536 |
| 1480460 | N/A | N/A | 20735 | 20754 | TTCACAACTCCCACCTTCAA | 53 | 1537 |
| 1480498 | N/A | N/A | 120527 | 120546 | AGCAATCTCTCATATTCTTC | 10 | 1538 |
| 1480534 | N/A | N/A | 3525 | 3544 | ATGATTAGTCACATCTATAC | 72 | 1539 |
| 1480542 | N/A | N/A | 149045 | 149064 | CCAGACTTGATTTCTGCTCT | 117 | 1540 |
| 1480562 | 1550 | 1569 | 76867 | 76886 | TCTCTAAGTTAACAATGCCA | 20 | 1541 |
| 1480565 | N/A | N/A | 86462 | 86481 | TCTACCAATTATCTCAGGGT | 38 | 1542 |
| 1480585 | N/A | N/A | 126831 | 126850 | CATTGTAAACTCACTCTAGA | 85 | 1543 |
| 1480604 | N/A | N/A | 110090 | 110109 | TTTGCATACTAACTACCACC | 40 | 1544 |
| 1480653 | N/A | N/A | 63369 | 63388 | TCAGGTCTCCATTCAAGTCA | 20 | 1545 |
| 1480654 | N/A | N/A | 26337 | 26356 | ATGCCAACTTGAACCTGCTC | 40 | 1546 |
| 1480655 | N/A | N/A | 204326 | 204345 | CTGAGTTACATCTTTTTGCA | 20 | 1547 |
| 1480658 | N/A | N/A | 118024 | 118043 | GTTATATAGAGCTCTATGTG | 12 | 1548 |
| 1480746 | N/A | N/A | 100085 | 100104 | ACACTTTGCATACATACCTT | 25 | 1549 |
| 1480752 | 815 | 834 | 18252 | 18271 | ATTCCACACACAAAACTGCA | 26 | 1550 |
| 1480757 | N/A | N/A | 198708 | 198727 | CAGCCACATCTTTTCTTGTA | 69 | 1551 |
| 1480765 | N/A | N/A | 89547 | 89566 | CCCTTGTATTTGCCTGACCT | 82 | 1552 |
| 1480806 | 624 | 643 | 13328 | 13347 | CGTTTCGAATCTTCAGAAGA | 78 | 1553 |
| 1480838 | N/A | N/A | 134983 | 135002 | AGGTACTTTTTTCACTTATC | 19 | 1554 |
| 1480871 | N/A | N/A | 173309 | 173328 | TACCAAATACTTCCATGCAT | 76 | 1555 |
| 1480877 | N/A | N/A | 135669 | 135688 | ATGAAAAATATCTTACCTGC | 96 | 1556 |
| 1480902 | N/A | N/A | 103680 | 103699 | GCAGCAGTCAATTCACTTCC | 23 | 1557 |
| 1480920 | N/A | N/A | 112318 | 112337 | GATCCTCTATCATTATCACC | 30 | 1558 |
| 1480924 | 3591 | 3610 | 223959 | 223978 | CATGGTCATAATTTTATGCT | 29 | 1559 |
| 1480959 | 3286 | 3305 | 221191 | 221210 | TAGTTTAGCCACATTTAATC | 54 | 1560 |
| 1480967 | N/A | N/A | 125685 | 125704 | CTGATGTTCTAACTCATCTC | 98 | 1561 |
| 1480999 | N/A | N/A | 93072 | 93091 | AAGCATTTCACACCTAACCC | 48 | 1562 |
| 1481008 | 2254 | 2273 | 116924 | 116943 | TTGCAAATGCATTCGGATCT | 31 | 1563 |
| 1481009 | 2675 | 2694 | 140784 | 140803 | CCAGCAACACATCAATCACA | 31 | 1564 |
| 1481012 | N/A | N/A | 71368 | 71387 | TAATGTTACTTTCACTGCAT | 41 | 1565 |
| 1481030 | N/A | N/A | 168357 | 168376 | ACCCAATATATTCTTCTAGC | 36 | 1566 |
| 1481072 | N/A | N/A | 107580 | 107599 | CCAGAATCTTTAATTGTCCT | 28 | 1567 |
| 1481099 | N/A | N/A | 3327 | 3346 | CCCAATCCAGCACTTTTTTA | 78 | 1568 |
| 1481113 | 3186 | 3205 | 212918 | 212937 | TCCAGTTTGCTTTCATCCTC | 62 | 1569 |
| 1481115 | 1421 | 1440 | 73453 | 73472 | GAATTCTGTCATCCTGCACA | 28 | 1570 |
| 1481126 | N/A | N/A | 139184 | 139203 | TCATCTATATCCTTTCAATC | 61 | 1571 |
| 1481184 | 2997 | 3016 | 202233 | 202252 | CTTCCTAGTTCATCCAAGAT | 65 | 1572 |
| 1481190 | 3083 | 3102 | 212815 | 212834 | CAAACAGGGTTAAGGATTTC | 61 | 1573 |
| 1481221 | N/A | N/A | 18309 | 18328 | GCCTGAAAAGACGACTTACC | 93 | 1574 |
| 1481274 | 1890 | 1909 | 109592 | 109611 | TGACCAAACACACTAGATTC | 31 | 1575 |
| 1481291 | 1345 | 1364 | 27018 | 27037 | AAGCAGCAGCTCTACTGGCT | 72 | 1576 |
| 1481317 | N/A | N/A | 165065 | 165084 | CAGAACATTAATCTTCTCCA | 50 | 1577 |
| 1481368 | 1491 | 1510 | 73523 | 73542 | GCATAAAACTCTGTAACTGC | 19 | 1578 |
| 1481417 | N/A | N/A | 49320 | 49339 | GGATAACTACACTTTCTTCA | 32 | 1579 |
| 1481452 | N/A | N/A | 21598 | 21617 | TAGGCATTTAACTCTGTCTT | 58 | 1580 |
| 1481476 | 3744 | 3763 | 224112 | 224131 | ACTTAAGGCTTTACTGGACT | 48 | 1581 |
| 1481577 | N/A | N/A | 3418 | 3437 | TGACTGCTTTTAACCGTAGT | 82 | 1582 |
| 1481592 | 744 | 763 | 18181 | 18200 | ATGCTTTTGGACCGTTTGTT | 2 | 433 |
| 1481631 | N/A | N/A | 2960 | 2979 | CCAGACAGAACCTACTATGT | 98 | 1583 |

TABLE 26
Reduction of MSH3 RNA by 5-10-5 MOE gapmers with mixed internucleoside linkages in A431 cells

| | SEQ ID | SEQ ID | SEQ ID | SEQ ID | | | |
|---|---|---|---|---|---|---|---|
| | NO: 1 | NO: 1 | NO: 2 | NO: 2 | | MSH3 | SEQ |
| Compound | Start | Stop | Start | Stop | | (% | ID |
| Number | Site | Site | Site | Site | Sequence (5′ to 3′) | UTC) | No. |
| 1479809 | N/A | N/A | 3524 | 3543 | TGATTAGTCACATCTATACC | 60 | 1584 |
| 1479813 | N/A | N/A | 9365 | 9384 | GCAGTAGAATCTATCCACAA | 26 | 1585 |
| 1479899 | N/A | N/A | 18307 | 18326 | CTGAAAAGACGACTTACCTC | 70 | 1586 |
| 1479907 | N/A | N/A | 140839 | 140858 | CATAAGGTACTTACTGATAA | 145 | 1587 |
| 1479912 | N/A | N/A | 161022 | 161041 | ACAACTTAATTTTCTAGGAC | 76 | 1588 |
| 1479916 | 3590 | 3609 | 223958 | 223977 | ATGGTCATAATTTTATGCTC | 23 | 1589 |
| 1479919 | N/A | N/A | 3406 | 3425 | ACCGTAGTGATTTCAAATAT | 65 | 1590 |
| 1479921 | N/A | N/A | 112315 | 112334 | CCTCTATCATTATCACCATA | 55 | 1591 |
| 1479930 | 2376 | 2395 | 123736 | 123755 | CCAACCTTTACCCAATCAGT | 44 | 1592 |
| 1479939 | 409 | 428 | 4502 | 4521 | AGACATTCCCAGATCACTTC | 43 | 1593 |
| 1479983 | 885 | 904 | 20256 | 20275 | TGGCAATAAATATTGAGCTC | 11 | 1594 |
| 1479993 | N/A | N/A | 17509 | 17528 | CCACATTTTCAACATTAGTA | 10 | 1595 |
| 1479996 | N/A | N/A | 36961 | 36980 | ATTCCACATTTACTTGGCTC | 6 | 1596 |
| 1480000 | N/A | N/A | 196608 | 196627 | GCACAATATCTTTACCTGCT | 110 | 1597 |
| 1480013 | N/A | N/A | 173308 | 173327 | ACCAAATACTTCCATGCATT | 37 | 1598 |
| 1480025 | 3185 | 3204 | 212917 | 212936 | CCAGTTTGCTTTCATCCTCA | 31 | 1599 |
| 1480045 | N/A | N/A | 217596 | 217615 | CTCCACTTTAAATTATGGTA | 41 | 1600 |
| 1480047 | N/A | N/A | 71287 | 71306 | TCTGTATCACGACCACAGTC | 67 | 1601 |
| 1480068 | 2865 | 2884 | 161713 | 161732 | ATGCCATCCACAATCCCAAT | 40 | 1602 |
| 1480177 | N/A | N/A | 93070 | 93089 | GCATTTCACACCTAACCCCT | 41 | 1603 |
| 1480190 | N/A | N/A | 126830 | 126849 | ATTGTAAACTCACTCTAGAA | 126 | 1604 |
| 1480192 | N/A | N/A | 204325 | 204344 | TGAGTTACATCTTTTTGCAA | 20 | 1605 |
| 1480232 | N/A | N/A | 25355 | 25374 | ACCCACAATATCTATCACCC | 22 | 1606 |
| 1480242 | N/A | N/A | 120518 | 120537 | TCATATTCTTCTCCTGGGAC | 54 | 1607 |
| 1480248 | N/A | N/A | 139181 | 139200 | TCTATATCCTTTCAATCTCC | 77 | 1608 |
| 1480279 | N/A | N/A | 58651 | 58670 | GTGCACATATTCTCAGTTAA | 120 | 1609 |
| 1480314 | 808 | 827 | 18245 | 18264 | ACACAAAACTGCATCTTTGT | 14 | 1610 |
| 1480334 | 3832 | 3851 | 224200 | 224219 | CAGTTGCCAATTATCTGAAC | 68 | 1611 |
| 1480357 | N/A | N/A | 168356 | 168375 | CCCAATATATTCTTCTAGCT | 33 | 1612 |
| 1480359 | N/A | N/A | 134384 | 134403 | CACTACATATTCTTTACAAC | 42 | 1613 |
| 1480362 | N/A | N/A | 144434 | 144453 | AGTTCTATATCAACTCCTAC | 55 | 1614 |
| 1480365 | N/A | N/A | 103678 | 103697 | AGCAGTCAATTCACTTCCAT | 54 | 1615 |
| 1480372 | N/A | N/A | 202121 | 202140 | CAGCACCCATCCTACAAGCA | 65 | 1616 |
| 1480387 | 3743 | 3762 | 224111 | 224130 | CTTAAGGCTTTACTGGACTT | 56 | 1617 |
| 1480399 | 1343 | 1362 | 27016 | 27035 | GCAGCAGCTCTACTGGCTGC | 87 | 1618 |
| 1480421 | N/A | N/A | 178581 | 178600 | ACTCAATGTTAACTATAGCT | 41 | 1619 |
| 1480437 | N/A | N/A | 85647 | 85666 | AAGGGTTATATCTACCAGCA | 15 | 1620 |
| 1480458 | 2234 | 2253 | 116904 | 116923 | CGTCAATAACACCTTGAATT | 11 | 1621 |
| 1480589 | N/A | N/A | 41979 | 41998 | CCATACTAACTTACCATTGC | 7 | 1622 |
| 1480621 | N/A | N/A | 148833 | 148852 | TCTTGCTTATTTATTACCAA | 22 | 1623 |
| 1480623 | 2131 | 2150 | 116087 | 116106 | ATTGAGTATCTTTAAGTAAT | 58 | 1624 |
| 1480671 | N/A | N/A | 48845 | 48864 | CAGGAAGATCTTTTCTCCAC | 32 | 1625 |
| 1480739 | N/A | N/A | 63368 | 63387 | CAGGTCTCCATTCAAGTCAT | 17 | 1626 |
| 1480743 | N/A | N/A | 110089 | 110108 | TTGCATACTAACTACCACCA | 34 | 1627 |
| 1480769 | N/A | N/A | 81341 | 81360 | TGTTAACTCATATCAGGTCT | 13 | 1628 |
| 1480779 | 2996 | 3015 | 202232 | 202251 | TTCCTAGTTCATCCAAGATA | 50 | 1629 |
| 1480780 | N/A | N/A | 78236 | 78255 | TTTGGCTTAATATACTGTTC | 11 | 1630 |
| 1480840 | 3081 | 3100 | 212813 | 212832 | AACAGGGTTAAGGATTTCAC | 16 | 1631 |
| 1480863 | N/A | N/A | 32695 | 32714 | TGCTATTCAACATAATAGTC | 58 | 1632 |
| 1480888 | 3285 | 3304 | 221190 | 221209 | AGTTTAGCCACATTTAATCC | 37 | 1633 |
| 1481027 | 1549 | 1568 | 76866 | 76885 | CTCTAAGTTAACAATGCCAG | 9 | 1634 |
| 1481033 | N/A | N/A | 135666 | 135685 | AAAAATATCTTACCTGCAGT | 100 | 1635 |
| 1481066 | N/A | N/A | 222495 | 222514 | TCATAGATACTTTTCCCTCA | 21 | 1636 |
| 1481076 | N/A | N/A | 21582 | 21601 | TCTTAATTCTGACTTCAGCC | 12 | 1637 |
| 1481139 | 1155 | 1174 | 23030 | 23049 | GTAGAAGTATCAGTCATTAT | 5 | 1638 |
| 1481192 | 1760 | 1779 | 92532 | 92551 | TGTGGTCTAAAACCCACAGC | 77 | 1639 |
| 1481194 | N/A | N/A | 100080 | 100099 | TTGCATACATACCTTCACCT | 38 | 1640 |
| 1481211 | N/A | N/A | 125680 | 125699 | GTTCTAACTCATCTCTGTCA | 20 | 1641 |
| 1481215 | N/A | N/A | 3326 | 3345 | CCAATCCAGCACTTTTTTAA | 85 | 1642 |
| 1481251 | N/A | N/A | 3180 | 3199 | TGCCATTAAAAACCTGCATA | 124 | 1643 |
| 1481257 | 2771 | 2790 | 161619 | 161638 | AGCTCTTTCCACCCATGTTT | 16 | 1644 |
| 1481335 | 463 | 482 | 13167 | 13186 | CAGAGACTTTGAAACATTCC | 5 | 1645 |
| 1481385 | 1889 | 1908 | 109591 | 109610 | GACCAAACACACTAGATTCT | 25 | 1646 |
| 1481415 | N/A | N/A | 2955 | 2974 | CAGAACCTACTATGTGCGGC | 61 | 1647 |
| 1481422 | 2674 | 2693 | 140783 | 140802 | CAGCAACACATCAATCACAG | 24 | 1648 |
| 1481450 | N/A | N/A | 165064 | 165083 | AGAACATTAATCTTCTCCAC | 43 | 1649 |
| 1481456 | N/A | N/A | 89542 | 89561 | GTATTTGCCTGACCTGATTC | 107 | 1650 |
| 1481477 | 1490 | 1509 | 73522 | 73541 | CATAAAACTCTGTAACTGCC | 18 | 1651 |
| 1481481 | 4348 | 4367 | 224716 | 224735 | CTATGACAATATTTAACCTT | 52 | 1652 |
| 1481495 | N/A | N/A | 63255 | 63274 | CTGTATTCAATGCCTGGAAC | 16 | 1653 |
| 1481510 | N/A | N/A | 20734 | 20753 | TCACAACTCCCACCTTCAAC | 76 | 1654 |
| 1481543 | N/A | N/A | 183345 | 183364 | CTGGTGACTACTCATTTGTA | 39 | 1655 |
| 1481553 | N/A | N/A | 117850 | 117869 | CATTCAACAATCTTTTGGCA | 23 | 1656 |
| 1481564 | N/A | N/A | 73448 | 73467 | CTGTCATCCTGCACACTGAA | 8 | 1657 |
| 1481568 | N/A | N/A | 107472 | 107491 | GCATATCTTTCAATGACTTA | 26 | 1658 |
| 1481592 | 744 | 763 | 18181 | 18200 | ATGCTTTTGGACCGTTTGTT | 3 | 433 |
| 1481608 | 621 | 640 | 13325 | 13344 | TTCGAATCTTCAGAAGAAAC | 72 | 1659 |
| 1481611 | N/A | N/A | 3499 | 3518 | AAGAAACTTTATCCACCCAA | 47 | 1660 |

TABLE 27
Reduction of MSH3 RNA by 5-10-5 MOE gapmers with mixed internucleoside linkages in A431 cells

| | SEQ ID | SEQ ID | SEQ ID | SEQ ID | | | |
|---|---|---|---|---|---|---|---|
| | NO: 1 | NO: 1 | NO: 2 | NO: 2 | | MSH3 | SEQ |
| Compound | Start | Stop | Start | Stop | | (% | ID |
| Number | Site | Site | Site | Site | Sequence (5′ to 3′) | UTC) | No. |
| 1479837 | 3737 | 3756 | 224105 | 224124 | GCTTTACTGGACTTACTGTC | 42 | 1661 |
| 1479844 | N/A | N/A | 99955 | 99974 | ATGGTTATTTACAACCTCAC | 69 | 1662 |
| 1479855 | N/A | N/A | 17492 | 17511 | GTACTCCTACTATTCTTACC | 37 | 1663 |
| 1479864 | N/A | N/A | 8540 | 8559 | ACCATGACTTCCTTTATGCT | 16 | 1664 |
| 1479872 | N/A | N/A | 63233 | 63252 | TGCCTAGTATAAAACAGGTA | 63 | 1665 |
| 1479878 | 1871 | 1890 | 109573 | 109592 | CTGAATGGAGAACTTCCGAT | 8 | 1666 |
| 1479929 | 170 | 189 | 2817 | 2836 | TGGATTTCAGGCTTCCCGTA | 32 | 1667 |
| 1479944 | N/A | N/A | 89538 | 89557 | TTGCCTGACCTGATTCTGTA | 53 | 1668 |
| 1479953 | 790 | 809 | 18227 | 18246 | GTGCTGCTGCTTCATTTCTA | 9 | 1669 |
| 1479967 | 3184 | 3203 | 212916 | 212935 | CAGTTTGCTTTCATCCTCAC | 58 | 1670 |
| 1480037 | N/A | N/A | 165063 | 165082 | GAACATTAATCTTCTCCACC | 6 | 1671 |
| 1480105 | N/A | N/A | 48424 | 48443 | GCAAACATTTTCCTACAGCA | 4 | 1672 |
| 1480107 | N/A | N/A | 178433 | 178452 | CTGCACACATTATAACCTCA | 35 | 1673 |
| 1480148 | 1548 | 1567 | 76865 | 76884 | TCTAAGTTAACAATGCCAGA | 9 | 1674 |
| 1480153 | N/A | N/A | 217576 | 217595 | GTTCTCATATCTTCAAGGTA | 18 | 1675 |
| 1480234 | N/A | N/A | 203625 | 203644 | ATGAAACTGTATTACTGCAC | 20 | 1676 |
| 1480238 | N/A | N/A | 25354 | 25373 | CCCACAATATCTATCACCCT | 34 | 1677 |
| 1480241 | N/A | N/A | 81256 | 81275 | ACAGACAGTTATCTTGGCAC | 20 | 1678 |
| 1480280 | N/A | N/A | 30158 | 30177 | GCTAACTTTTGAATTTCCTC | 5 | 1679 |
| 1480301 | N/A | N/A | 222187 | 222206 | TAGGCATTACTATTTCAATA | 12 | 1680 |
| 1480303 | N/A | N/A | 20732 | 20751 | ACAACTCCCACCTTCAACAA | 74 | 1681 |
| 1480307 | N/A | N/A | 126829 | 126848 | TTGTAAACTCACTCTAGAAA | 100 | 1682 |
| 1480319 | 2673 | 2692 | 140782 | 140801 | AGCAACACATCAATCACAGG | 15 | 1683 |
| 1480348 | 1325 | 1344 | 26998 | 27017 | GCAGGCTTGACATCCGGGTT | 4† | 1684 |
| 1480349 | N/A | N/A | 135663 | 135682 | AATATCTTACCTGCAGTAAT | 77 | 1685 |
| 1480380 | N/A | N/A | 85636 | 85655 | CTACCAGCATCCTAAGGTAT | 123 | 1686 |
| 1480385 | 2233 | 2252 | 116903 | 116922 | GTCAATAACACCTTGAATTT | 24 | 1687 |
| 1480390 | 462 | 481 | 13166 | 13185 | AGAGACTTTGAAACATTCCT | 2 | 1688 |
| 1480412 | N/A | N/A | 160998 | 161017 | CTGTACTGATCAATTATAGT | 53 | 1689 |
| 1480414 | N/A | N/A | 148831 | 148850 | TTGCTTATTTATTACCAATC | 42 | 1690 |
| 1480425 | N/A | N/A | 120412 | 120431 | GCCGAAACTCTTACTCACTC | 11 | 1691 |
| 1480492 | 3831 | 3850 | 224199 | 224218 | AGTTGCCAATTATCTGAACT | 30 | 1692 |
| 1480499 | N/A | N/A | 202120 | 202139 | AGCACCCATCCTACAAGCAA | 93 | 1693 |
| 1480521 | N/A | N/A | 117445 | 117464 | GTAGTTTTTCACTCTAGACT | 6 | 1694 |
| 1480554 | N/A | N/A | 78201 | 78220 | TTGGTCATATATTAATAGCT | 9 | 1695 |
| 1480580 | N/A | N/A | 39667 | 39686 | TGTCTTACTTATTATTGGCC | 7 | 1696 |
| 1480594 | N/A | N/A | 139085 | 139104 | TACTATCACATCTTTCAGCA | 26 | 1697 |
| 1480605 | 2127 | 2146 | 116083 | 116102 | AGTATCTTTAAGTAATGCTC | 41 | 1698 |
| 1480642 | N/A | N/A | 18306 | 18325 | TGAAAAGACGACTTACCTCT | 56 | 1699 |
| 1480659 | N/A | N/A | 71271 | 71290 | AGTCTCTTAATTTCTAGGGC | 18 | 1700 |
| 1480740 | N/A | N/A | 110088 | 110107 | TGCATACTAACTACCACCAC | 33 | 1701 |
| 1480764 | N/A | N/A | 168243 | 168262 | GTGAACTATTTAACTGAACA | 21 | 1702 |
| 1480772 | N/A | N/A | 92992 | 93011 | TTGCTAACTTGATCCCACCA | 52 | 1703 |
| 1480782 | 4326 | 4345 | 224694 | 224713 | AAATTTCATGACCTTATTCC | 32 | 1704 |
| 1480795 | N/A | N/A | 36830 | 36849 | CCGACCACTTAATAACATTT | 13 | 1705 |
| 1480796 | N/A | N/A | 112285 | 112304 | TTGGTACATATTCCAGGGCA | 18 | 1706 |
| 1480837 | N/A | N/A | 3497 | 3516 | GAAACTTTATCCACCCAAAC | 39 | 1707 |
| 1480839 | 3284 | 3303 | 221189 | 221208 | GTTTAGCCACATTTAATCCA | 28 | 1708 |
| 1480856 | 3589 | 3608 | 223957 | 223976 | TGGTCATAATTTTATGCTCA | 29 | 1709 |
| 1480864 | N/A | N/A | 212811 | 212830 | CAGGGTTAAGGATTTCACCT | 53 | 1710 |
| 1480876 | N/A | N/A | 3179 | 3198 | GCCATTAAAAACCTGCATAA | 49 | 1711 |
| 1480904 | N/A | N/A | 57928 | 57947 | CCACAAATTTTGCCTCCAAC | 17 | 1712 |
| 1480917 | 2864 | 2883 | 161712 | 161731 | TGCCATCCACAATCCCAATT | 51 | 1713 |
| 1480918 | N/A | N/A | 3304 | 3323 | AATCAGTAAAACTCTTCGAC | 50 | 1714 |
| 1480944 | 883 | 902 | 20254 | 20273 | GCAATAAATATTGAGCTCTC | 12 | 1715 |
| 1480952 | N/A | N/A | 103677 | 103696 | GCAGTCAATTCACTTCCATT | 10 | 1716 |
| 1480964 | 408 | 427 | 4501 | 4520 | GACATTCCCAGATCACTTCC | 37 | 1717 |
| 1480968 | N/A | N/A | 144433 | 144452 | GTTCTATATCAACTCCTACT | 26 | 1718 |
| 1480981 | N/A | N/A | 63367 | 63386 | AGGTCTCCATTCAAGTCATC | 26 | 1719 |
| 1481063 | 2375 | 2394 | 123735 | 123754 | CAACCTTTACCCAATCAGTT | 32 | 1720 |
| 1481064 | 2995 | 3014 | 202231 | 202250 | TCCTAGTTCATCCAAGATAA | 36 | 1721 |
| 1481159 | N/A | N/A | 107299 | 107318 | CCAGACTTAATCCCTTTACT | 23 | 1722 |
| 1481168 | N/A | N/A | 140836 | 140855 | AAGGTACTTACTGATAAATC | 50 | 1723 |
| 1481186 | N/A | N/A | 172634 | 172653 | TTTGTTTCACTTCATACCCT | 24 | 1724 |
| 1481235 | N/A | N/A | 3523 | 3542 | GATTAGTCACATCTATACCA | 64 | 1725 |
| 1481248 | N/A | N/A | 125512 | 125531 | AGGCCAACATATTTATCAAA | 61 | 1726 |
| 1481263 | N/A | N/A | 191631 | 191650 | CAGGACATATACTCCATGCC | 57 | 1727 |
| 1481292 | N/A | N/A | 73445 | 73464 | TCATCCTGCACACTGAAAGA | 46 | 1728 |
| 1481296 | 582 | 601 | 13286 | 13305 | AGACTGATATCATCAAAATC | 23 | 1729 |
| 1481312 | N/A | N/A | 20854 | 20873 | GTCCAAAAAGGATATCTTCT | 99 | 1730 |
| 1481356 | 1152 | 1171 | 23027 | 23046 | GAAGTATCAGTCATTATCTC | 3 | 1731 |
| 1481386 | N/A | N/A | 134244 | 134263 | CAGTGCAATTTTACAGACTC | 23 | 1732 |
| 1481487 | 1758 | 1777 | 92530 | 92549 | TGGTCTAAAACCCACAGCAA | 78 | 1733 |
| 1481512 | 1489 | 1508 | 73521 | 73540 | ATAAAACTCTGTAACTGCCT | 16 | 1734 |
| 1481545 | N/A | N/A | 183258 | 183277 | GTTCTTACCAAACTTTTCCT | 28 | 1735 |
| 1481554 | 2768 | 2787 | 161616 | 161635 | TCTTTCCACCCATGTTTGGT | 47 | 1736 |
| 1481592 | 744 | 763 | 18181 | 18200 | ATGCTTTTGGACCGTTTGTT | 2 | 433 |
| 1481641 | N/A | N/A | 3405 | 3424 | CCGTAGTGATTTCAAATATT | 22 | 1737 |

TABLE 28
Reduction of MSH3 RNA by 5-10-5 MOE gapmers with mixed internucleoside linkages in A431 cells

| | SEQ ID | SEQ ID | SEQ ID | SEQ ID | | | |
|---|---|---|---|---|---|---|---|
| | NO: 1 | NO: 1 | NO: 2 | NO: 2 | | MSH3 | SEQ |
| Compound | Start | Stop | Start | Stop | | (% | ID |
| Number | Site | Site | Site | Site | Sequence (5′ to 3′) | UTC) | No. |
| 1479812 | N/A | N/A | 191630 | 191649 | AGGACATATACTCCATGCCA | 79 | 1738 |
| 1479832 | N/A | N/A | 63364 | 63383 | TCTCCATTCAAGTCATCATC | 47 | 1739 |
| 1479835 | 1150 | 1169 | 23025 | 23044 | AGTATCAGTCATTATCTCAT | 1 | 1740 |
| 1479848 | N/A | N/A | 164978 | 164997 | TTACATCTTTACCTTTGATC | 65 | 1741 |
| 1479856 | N/A | N/A | 57913 | 57932 | CCAACAGCACCTTTTTCACT | 33 | 1742 |
| 1479888 | N/A | N/A | 168143 | 168162 | TCATGGCTCCATTTTAAGCC | 67 | 1743 |
| 1479904 | N/A | N/A | 3522 | 3541 | ATTAGTCACATCTATACCAT | 80 | 1744 |
| 1479943 | 3282 | 3301 | 221187 | 221206 | TTAGCCACATTTAATCCATA | 22 | 1745 |
| 1479948 | N/A | N/A | 20853 | 20872 | TCCAAAAAGGATATCTTCTC | 104 | 1746 |
| 1480023 | N/A | N/A | 133282 | 133301 | GTGCCTACTTTCTACATTTA | 57 | 1747 |
| 1480100 | N/A | N/A | 3403 | 3422 | GTAGTGATTTCAAATATTGA | 50 | 1748 |
| 1480135 | N/A | N/A | 135655 | 135674 | ACCTGCAGTAATCTCCTTGC | 71 | 1749 |
| 1480173 | 3736 | 3755 | 224104 | 224123 | CTTTACTGGACTTACTGTCC | 155 | 1750 |
| 1480183 | N/A | N/A | 110087 | 110106 | GCATACTAACTACCACCACA | 14 | 1751 |
| 1480246 | N/A | N/A | 112164 | 112183 | GACATCACCCACTATGTGGT | 52 | 1752 |
| 1480255 | 459 | 478 | 13163 | 13182 | GACTTTGAAACATTCCTGGT | 16 | 1753 |
| 1480313 | 3828 | 3847 | 224196 | 224215 | TGCCAATTATCTGAACTGAA | 15 | 1754 |
| 1480343 | 581 | 600 | 13285 | 13304 | GACTGATATCATCAAAATCA | 20 | 1755 |
| 1480407 | N/A | N/A | 3496 | 3515 | AAACTTTATCCACCCAAACT | 85 | 1756 |
| 1480466 | N/A | N/A | 48387 | 48406 | CCATTTAGTCACTACCATCT | 7 | 1757 |
| 1480468 | N/A | N/A | 85347 | 85366 | ACTCCATATTACTCTAACCC | 70 | 1758 |
| 1480482 | N/A | N/A | 30087 | 30106 | GCAGATTTAACTTTTGACTT | 5 | 1759 |
| 1480545 | 3579 | 3598 | 223947 | 223966 | TTTATGCTCACATGTCACAC | 21 | 1760 |
| 1480611 | N/A | N/A | 63232 | 63251 | GCCTAGTATAAAACAGGTAC | 99 | 1761 |
| 1480632 | N/A | N/A | 172569 | 172588 | TTCAACACATGATTTCTCCA | 45 | 1762 |
| 1480646 | 407 | 426 | 4500 | 4519 | ACATTCCCAGATCACTTCCT | 54 | 1763 |
| 1480677 | N/A | N/A | 148830 | 148849 | TGCTTATTTATTACCAATCT | 55 | 1764 |
| 1480692 | N/A | N/A | 120411 | 120430 | CCGAAACTCTTACTCACTCC | 12 | 1765 |
| 1480703 | 2671 | 2690 | 140780 | 140799 | CAACACATCAATCACAGGGT | 14 | 1766 |
| 1480744 | 3180 | 3199 | 212912 | 212931 | TTGCTTTCATCCTCACTGAC | 45 | 1767 |
| 1480760 | N/A | N/A | 160177 | 160196 | TAGCCACACATTTCCAGTCT | 55 | 1768 |
| 1480773 | 2994 | 3013 | 202230 | 202249 | CCTAGTTCATCCAAGATAAC | 156 | 1769 |
| 1480802 | N/A | N/A | 217550 | 217569 | GCAACCACTCTTCTATAATC | 89 | 1770 |
| 1480824 | 2125 | 2144 | 116081 | 116100 | TATCTTTAAGTAATGCTCCA | 89 | 1771 |
| 1480847 | N/A | N/A | 89534 | 89553 | CTGACCTGATTCTGTAGGAT | 55 | 1772 |
| 1480899 | N/A | N/A | 36645 | 36664 | GCATAACAATTCCTCTGATA | 2 | 1773 |
| 1480909 | N/A | N/A | 125510 | 125529 | GCCAACATATTTATCAAAGC | 12 | 1774 |
| 1480980 | N/A | N/A | 103567 | 103586 | TGATCCAGCATATCTAGTTA | 41 | 1775 |
| 1480998 | N/A | N/A | 140835 | 140854 | AGGTACTTACTGATAAATCT | 94 | 1776 |
| 1481000 | N/A | N/A | 183252 | 183271 | ACCAAACTTTTCCTACGGGA | 31 | 1777 |
| 1481025 | N/A | N/A | 99954 | 99973 | TGGTTATTTACAACCTCACA | 82 | 1778 |
| 1481057 | N/A | N/A | 117416 | 117435 | TAGCAGCTATACTCTTAACT | 20 | 1779 |
| 1481059 | 1487 | 1506 | 73519 | 73538 | AAAACTCTGTAACTGCCTGG | 14 | 1780 |
| 1481097 | N/A | N/A | 3303 | 3322 | ATCAGTAAAACTCTTCGACC | 62 | 1781 |
| 1481120 | N/A | N/A | 202118 | 202137 | CACCCATCCTACAAGCAAGA | 84 | 1782 |
| 1481134 | N/A | N/A | 92844 | 92863 | AGGCATCTATCCTCACTTTC | 40 | 1783 |
| 1481136 | N/A | N/A | 212808 | 212827 | GGTTAAGGATTTCACCTAAA | 52 | 1784 |
| 1481143 | N/A | N/A | 71270 | 71289 | GTCTCTTAATTTCTAGGGCT | 40 | 1785 |
| 1481146 | N/A | N/A | 81167 | 81186 | CCATAAGTTTATTTCCAGAC | 4 | 1786 |
| 1481165 | 785 | 804 | 18222 | 18241 | GCTGCTTCATTTCTATGTAT | 22 | 1787 |
| 1481205 | 2372 | 2391 | 123732 | 123751 | CCTTTACCCAATCAGTTGGT | 68 | 1788 |
| 1481269 | 1870 | 1889 | 109572 | 109591 | TGAATGGAGAACTTCCGATA | 38 | 1789 |
| 1481290 | 167 | 186 | 2814 | 2833 | ATTTCAGGCTTCCCGTAGAC | 31 | 1790 |
| 1481336 | 2862 | 2881 | 161710 | 161729 | CCATCCACAATCCCAATTGT | 64 | 1791 |
| 1481340 | 2231 | 2250 | 116901 | 116920 | CAATAACACCTTGAATTTCA | 21 | 1792 |
| 1481350 | 1757 | 1776 | 92529 | 92548 | GGTCTAAAACCCACAGCAAA | 59 | 1793 |
| 1481437 | N/A | N/A | 18304 | 18323 | AAAAGACGACTTACCTCTGC | 111 | 1794 |
| 1481453 | N/A | N/A | 3178 | 3197 | CCATTAAAAACCTGCATAAC | 107 | 1795 |
| 1481457 | N/A | N/A | 202692 | 202711 | TGTGTAGCATTCTAATGATC | 21 | 1796 |
| 1481471 | 1547 | 1566 | 76864 | 76883 | CTAAGTTAACAATGCCAGAA | 5 | 1797 |
| 1481479 | N/A | N/A | 178432 | 178451 | TGCACACATTATAACCTCAT | 40 | 1798 |
| 1481484 | 880 | 899 | 20251 | 20270 | ATAAATATTGAGCTCTCGGG | 14 | 1799 |
| 1481500 | N/A | N/A | 78200 | 78219 | TGGTCATATATTAATAGCTC | 9 | 1800 |
| 1481505 | N/A | N/A | 126827 | 126846 | GTAAACTCACTCTAGAAAAT | 81 | 1801 |
| 1481508 | 1312 | 1331 | 26985 | 27004 | CCGGGTTTCTAGCTCTGAAC | 3† | 1802 |
| 1481580 | 987 | 1006 | 20738 | 20757 | TGCTTCACAACTCCCACCTT | 38 | 1803 |
| 1481586 | N/A | N/A | 17488 | 17507 | TCCTACTATTCTTACCTTTC | 46 | 1804 |
| 1481591 | N/A | N/A | 8539 | 8558 | CCATGACTTCCTTTATGCTA | 20 | 1805 |
| 1481592 | 744 | 763 | 18181 | 18200 | ATGCTTTTGGACCGTTTGTT | 3 | 433 |
| 1481597 | N/A | N/A | 143714 | 143733 | TGGTACTTATTAACTTGTTT | 18 | 1806 |
| 1481606 | N/A | N/A | 23944 | 23963 | ATGGTATTTTATATCAGCCA | 25 | 1807 |
| 1481607 | N/A | N/A | 138875 | 138894 | CATGAAATTTCACCATCACC | 42 | 1808 |
| 1481619 | N/A | N/A | 222083 | 222102 | GCCAAGATTTTCTATTCGAT | 31 | 1809 |
| 1481623 | N/A | N/A | 39653 | 39672 | TTGGCCCTTTGATCTATCTT | 44 | 1810 |
| 1481624 | N/A | N/A | 72898 | 72917 | ACTGCTATTTTATATCACCT | 8 | 1811 |
| 1481626 | 4325 | 4344 | 224693 | 224712 | AATTTCATGACCTTATTCCT | 31 | 1812 |
| 1481627 | N/A | N/A | 107213 | 107232 | TGGGAATTTACTACTTCACT | 22 | 1813 |
| 1481643 | 2767 | 2786 | 161615 | 161634 | CTTTCCACCCATGTTTGGTC | 29 | 1814 |

TABLE 29
Reduction of MSH3 RNA by 5-10-5 MOE gapmers with mixed internucleoside linkages in A431 cells

| | SEQ ID | SEQ ID | SEQ ID | SEQ ID | | | |
|---|---|---|---|---|---|---|---|
| | NO: 1 | NO: 1 | NO: 2 | NO: 2 | | MSH3 | SEQ |
| Compound | Start | Stop | Start | Stop | | (% | ID |
| Number | Site | Site | Site | Site | Sequence (5′ to 3′) | UTC) | No. |
| 1479838 | N/A | N/A | 3400 | 3419 | GTGATTTCAAATATTGAGCC | 35 | 1815 |
| 1479859 | N/A | N/A | 202551 | 202570 | ACGGTATTATGACTACAGCA | 20 | 1816 |
| 1479884 | N/A | N/A | 63231 | 63250 | CCTAGTATAAAACAGGTACT | 67 | 1817 |
| 1479918 | N/A | N/A | 222082 | 222101 | CCAAGATTTTCTATTCGATC | 20 | 1818 |
| 1479931 | 2229 | 2248 | 116899 | 116918 | ATAACACCTTGAATTTCATC | 20 | 1819 |
| 1479945 | N/A | N/A | 18303 | 18322 | AAAGACGACTTACCTCTGCA | 99 | 1820 |
| 1479956 | N/A | N/A | 63363 | 63382 | CTCCATTCAAGTCATCATCT | 24 | 1821 |
| 1479959 | N/A | N/A | 3302 | 3321 | TCAGTAAAACTCTTCGACCA | 81 | 1822 |
| 1480011 | 1149 | 1168 | 23024 | 23043 | GTATCAGTCATTATCTCATC | 1 | 1823 |
| 1480075 | N/A | N/A | 48382 | 48401 | TAGTCACTACCATCTCTACT | 27 | 1824 |
| 1480097 | 878 | 897 | 20249 | 20268 | AAATATTGAGCTCTCGGGCT | 41 | 1825 |
| 1480121 | N/A | N/A | 110055 | 110074 | GCAGATTTTTCCATAGTTTA | 13 | 1826 |
| 1480126 | N/A | N/A | 6464 | 6483 | GTCTTATTTCAACAACATTC | 12 | 1827 |
| 1480164 | 1869 | 1888 | 109571 | 109590 | GAATGGAGAACTTCCGATAC | 20 | 1828 |
| 1480165 | N/A | N/A | 217547 | 217566 | ACCACTCTTCTATAATCGCC | 43 | 1829 |
| 1480176 | 1756 | 1775 | 92528 | 92547 | GTCTAAAACCCACAGCAAAC | 70 | 1830 |
| 1480213 | N/A | N/A | 212806 | 212825 | TTAAGGATTTCACCTAAAGC | 103 | 1831 |
| 1480217 | N/A | N/A | 133248 | 133267 | TCAGATATTCTGTACGACCT | 16 | 1832 |
| 1480225 | 2669 | 2688 | 140778 | 140797 | ACACATCAATCACAGGGTGC | 63 | 1833 |
| 1480263 | 1545 | 1564 | 76862 | 76881 | AAGTTAACAATGCCAGAAAT | 19 | 1834 |
| 1480361 | 3568 | 3587 | 223936 | 223955 | ATGTCACACAAAGATAGGCT | 23 | 1835 |
| 1480386 | N/A | N/A | 36609 | 36628 | GTTATCACTTCATTTTGGCA | 2 | 1836 |
| 1480435 | N/A | N/A | 168124 | 168143 | CCTCATCCTTATTTATTCAC | 70 | 1837 |
| 1480450 | 4324 | 4343 | 224692 | 224711 | ATTTCATGACCTTATTCCTT | 37 | 1838 |
| 1480469 | N/A | N/A | 3521 | 3540 | TTAGTCACATCTATACCATC | 70 | 1839 |
| 1480475 | N/A | N/A | 182994 | 183013 | GTAATCATTTTATACTCCTA | 23 | 1840 |
| 1480480 | 2861 | 2880 | 161709 | 161728 | CATCCACAATCCCAATTGTC | 74 | 11 |
| 1480484 | 770 | 789 | 18207 | 18226 | TGTATTGTAATTCTAGCGGC | 8 | 1841 |
| 1480488 | N/A | N/A | 120368 | 120387 | CCACACTTAACCCATTCCTC | 26 | 1842 |
| 1480656 | 2371 | 2390 | 123731 | 123750 | CTTTACCCAATCAGTTGGTA | 74 | 1843 |
| 1480668 | N/A | N/A | 148829 | 148848 | GCTTATTTATTACCAATCTC | 32 | 1844 |
| 1480672 | 1842 | 1861 | 109544 | 109563 | AGCCGGGCATTTATTTCCCT | 52 | 1845 |
| 1480694 | N/A | N/A | 23931 | 23950 | TCAGCCAATTATCATTTCTC | 20 | 1846 |
| 1480725 | N/A | N/A | 3494 | 3513 | ACTTTATCCACCCAAACTGT | 142 | 1847 |
| 1480732 | N/A | N/A | 20354 | 20373 | AGCCAAAGCTGACCTTATAT | 76 | 1848 |
| 1480738 | 3827 | 3846 | 224195 | 224214 | GCCAATTATCTGAACTGAAA | 19 | 1849 |
| 1480845 | N/A | N/A | 160176 | 160195 | AGCCACACATTTCCAGTCTC | 51 | 1850 |
| 1480852 | N/A | N/A | 126822 | 126841 | CTCACTCTAGAAAATCAAGC | 72 | 1851 |
| 1480893 | N/A | N/A | 125509 | 125528 | CCAACATATTTATCAAAGCT | 11 | 1852 |
| 1480991 | 1709 | 1728 | 89524 | 89543 | TCTGTAGGATTTCCAGATTC | 45 | 1853 |
| 1480995 | N/A | N/A | 143282 | 143301 | ACATGCATTATATACTACCA | 27 | 1854 |
| 1481043 | N/A | N/A | 178430 | 178449 | CACACATTATAACCTCATGC | 35 | 1855 |
| 1481061 | N/A | N/A | 29371 | 29390 | TCTTGATCACCATTTCTCAT | 46 | 1856 |
| 1481074 | N/A | N/A | 138874 | 138893 | ATGAAATTTCACCATCACCA | 26 | 1857 |
| 1481081 | N/A | N/A | 107154 | 107173 | TCATTTCTTATCCCTACATT | 72 | 1858 |
| 1481096 | N/A | N/A | 81097 | 81116 | CTGTCTTTTTTTAATCCCAC | 58 | 1859 |
| 1481098 | N/A | N/A | 14937 | 14956 | TCATCAGATACATTACATTC | 65 | 1860 |
| 1481160 | 1485 | 1504 | 73517 | 73536 | AACTCTGTAACTGCCTGGAA | 7 | 1861 |
| 1481170 | N/A | N/A | 186977 | 186996 | GCAAATTCTTATTTTAGGGC | 18 | 1862 |
| 1481172 | 2752 | 2771 | 161600 | 161619 | TGGTCCGGTAATTATCATTA | 23 | 1863 |
| 1481180 | N/A | N/A | 102864 | 102883 | ATGCAACATTCTATTACTTC | 14 | 1864 |
| 1481183 | N/A | N/A | 140832 | 140851 | TACTTACTGATAAATCTGTA | 81 | 1865 |
| 1481217 | 1307 | 1326 | 26980 | 26999 | TTTCTAGCTCTGAACGAGAA | 15† | 1866 |
| 1481222 | N/A | N/A | 3175 | 3194 | TTAAAAACCTGCATAACCTT | 82 | 1867 |
| 1481227 | 3178 | 3197 | 212910 | 212929 | GCTTTCATCCTCACTGACCA | 25 | 1868 |
| 1481233 | N/A | N/A | 117314 | 117333 | ATCAAAGACTAACTTCTCTT | 63 | 1869 |
| 1481252 | 142 | 161 | 2789 | 2808 | GAATCGGCTCAAAACCGCTT | 48 | 1870 |
| 1481273 | N/A | N/A | 20852 | 20871 | CCAAAAAGGATATCTTCTCC | 101 | 1871 |
| 1481276 | N/A | N/A | 85344 | 85363 | CCATATTACTCTAACCCTGC | 54 | 1872 |
| 1481294 | N/A | N/A | 71164 | 71183 | ATTTTAGGTTCACTTACCTT | 114 | 1873 |
| 1481295 | N/A | N/A | 112011 | 112030 | GTTACCAGATCATTTCTACT | 18 | 1874 |
| 1481360 | 405 | 424 | 4498 | 4517 | ATTCCCAGATCACTTCCTCC | 62 | 1875 |
| 1481362 | 3281 | 3300 | 221186 | 221205 | TAGCCACATTTAATCCATAA | 37 | 1876 |
| 1481366 | N/A | N/A | 77978 | 77997 | CAGCAACCTTGAACCAGCAC | 42 | 1877 |
| 1481396 | N/A | N/A | 39384 | 39403 | CGTTAAGACCTTATTTTCTT | 2 | 1878 |
| 1481406 | 3735 | 3754 | 224103 | 224122 | TTTACTGGACTTACTGTCCA | 131 | 1879 |
| 1481410 | N/A | N/A | 202117 | 202136 | ACCCATCCTACAAGCAAGAT | 89 | 1880 |
| 1481412 | N/A | N/A | 135654 | 135673 | CCTGCAGTAATCTCCTTGCT | 93 | 1881 |
| 1481431 | 2118 | 2137 | 116074 | 116093 | AAGTAATGCTCCACTGGACT | 21 | 1882 |
| 1481480 | 577 | 596 | 13281 | 13300 | GATATCATCAAAATCAGTAC | 37 | 1883 |
| 1481504 | 2993 | 3012 | 202229 | 202248 | CTAGTTCATCCAAGATAACC | 61 | 1884 |
| 1481525 | N/A | N/A | 57912 | 57931 | CAACAGCACCTTTTTCACTC | 31 | 1885 |
| 1481535 | N/A | N/A | 99774 | 99793 | TGCTGAAGTCCTTATCCCTC | 28 | 1886 |
| 1481579 | 458 | 477 | 13162 | 13181 | ACTTTGAAACATTCCTGGTC | 35 | 1887 |
| 1481592 | 744 | 763 | 18181 | 18200 | ATGCTTTTGGACCGTTTGTT | 3 | 433 |
| 1481610 | N/A | N/A | 171328 | 171347 | ACCATGTAAGCATTTCACCA | 22 | 1888 |
| 1481617 | N/A | N/A | 164898 | 164917 | GTCTCAGAATAATTCTACTT | 33 | 1889 |
| 1481639 | N/A | N/A | 72897 | 72916 | CTGCTATTTTATATCACCTA | 14 | 1890 |

TABLE 30
Reduction of MSH3 RNA by 5-10-5 MOE gapmers with mixed internucleoside linkages in A431 cells

| | SEQ ID | SEQ ID | SEQ ID | SEQ ID | | | |
|---|---|---|---|---|---|---|---|
| | NO: 1 | NO: 1 | NO: 2 | NO: 2 | | MSH3 | SEQ |
| Compound | Start | Stop | Start | Stop | | (% | ID |
| Number | Site | Site | Site | Site | Sequence (5′ to 3′) | UTC) | No. |
| 1479818 | N/A | N/A | 81095 | 81114 | GTCTTTTTTTAATCCCACCC | 60 | 1891 |
| 1479824 | N/A | N/A | 125497 | 125516 | TCAAAGCTTTATCTTCTGGA | 11 | 1892 |
| 1479826 | N/A | N/A | 71159 | 71178 | AGGTTCACTTACCTTCGGTC | 25 | 1893 |
| 1479831 | N/A | N/A | 178429 | 178448 | ACACATTATAACCTCATGCA | 41 | 1894 |
| 1479841 | 555 | 574 | 13259 | 13278 | TTTGGCAGAACTGCAAATCT | 23 | 1895 |
| 1479858 | 363 | 382 | 4456 | 4475 | ACTTTCTTTTTAACAGGCCC | 11 | 19 |
| 1479871 | N/A | N/A | 112010 | 112029 | TTACCAGATCATTTCTACTC | 46 | 1896 |
| 1479877 | N/A | N/A | 6395 | 6414 | ATCATCAATTCTCTTCATCT | 31 | 1897 |
| 1479897 | 1534 | 1553 | 76851 | 76870 | GCCAGAAATAATTTGAGAAC | 27 | 1898 |
| 1479913 | 1287 | 1306 | 26960 | 26979 | GCAGAGTCCTGGAAACTATC | 1† | 1899 |
| 1479958 | N/A | N/A | 20353 | 20372 | GCCAAAGCTGACCTTATATC | 58 | 1900 |
| 1479973 | N/A | N/A | 20847 | 20866 | AAGGATATCTTCTCCAATAA | 70 | 1901 |
| 1479992 | N/A | N/A | 23916 | 23935 | TTCTCTTTAACTATCCCCTC | 23 | 1902 |
| 1479998 | N/A | N/A | 117190 | 117209 | GTTGCATTACTTTAACAAGA | 11 | 1903 |
| 1480010 | N/A | N/A | 63225 | 63244 | ATAAAACAGGTACTCAACCT | 110 | 1904 |
| 1480021 | N/A | N/A | 222081 | 222100 | CAAGATTTTCTATTCGATCA | 33 | 1905 |
| 1480039 | 746 | 765 | 18183 | 18202 | AGATGCTTTTGGACCGTTTG | 2 | 1906 |
| 1480050 | 1868 | 1887 | 109570 | 109589 | AATGGAGAACTTCCGATACA | 28 | 1907 |
| 1480053 | N/A | N/A | 3520 | 3539 | TAGTCACATCTATACCATCC | 49 | 1908 |
| 1480072 | 1705 | 1724 | 89520 | 89539 | TAGGATTTCCAGATTCCTTA | 74 | 1909 |
| 1480143 | N/A | N/A | 202316 | 202335 | CAGTTTACCGGATACTTACA | 64 | 1910 |
| 1480243 | N/A | N/A | 39275 | 39294 | CTGTACTGAAACACTATTCA | 13 | 1911 |
| 1480262 | N/A | N/A | 3371 | 3390 | CAGTCTTAAAAACTGGAGAC | 55 | 1912 |
| 1480309 | N/A | N/A | 3301 | 3320 | CAGTAAAACTCTTCGACCAC | 48 | 1913 |
| 1480311 | N/A | N/A | 126821 | 126840 | TCACTCTAGAAAATCAAGCC | 50 | 1914 |
| 1480317 | N/A | N/A | 168004 | 168023 | ACATACACTTCTCTAGCATT | 29 | 1915 |
| 1480341 | 2361 | 2380 | 123721 | 123740 | TCAGTTGGTATACAAGATAC | 39 | 1916 |
| 1480358 | N/A | N/A | 14893 | 14912 | TGCTGAACTCAATTTAACCT | 41 | 1917 |
| 1480374 | 1746 | 1765 | 92518 | 92537 | CACAGCAAACTTCCTTTGGT | 47 | 1918 |
| 1480376 | 3177 | 3196 | 212909 | 212928 | CTTTCATCCTCACTGACCAA | 40 | 1919 |
| 1480424 | N/A | N/A | 29370 | 29389 | CTTGATCACCATTTCTCATA | 64 | 1920 |
| 1480454 | 140 | 159 | 2787 | 2806 | ATCGGCTCAAAACCGCTTGC | 78 | 1921 |
| 1480459 | N/A | N/A | 99575 | 99594 | AGGAGCTACATCTACAAGCC | 57 | 1922 |
| 1480477 | N/A | N/A | 47858 | 47877 | GCCTAGTTATCATCAATATC | 36 | 1923 |
| 1480506 | N/A | N/A | 171325 | 171344 | ATGTAAGCATTTCACCAGAT | 17 | 1924 |
| 1480509 | 2658 | 2677 | 140767 | 140786 | ACAGGGTGCCTTCCATTTTT | 25 | 1925 |
| 1480510 | N/A | N/A | 120257 | 120276 | TCCACATTTTAAACCAGTAA | 9 | 1926 |
| 1480529 | N/A | N/A | 143281 | 143300 | CATGCATTATATACTACCAA | 36 | 1927 |
| 1480547 | N/A | N/A | 76964 | 76983 | TTTGGAGGAATCACTTACTC | 58 | 1928 |
| 1480549 | 3734 | 3753 | 224102 | 224121 | TTACTGGACTTACTGTCCAT | 65 | 1929 |
| 1480557 | N/A | N/A | 138864 | 138883 | ACCATCACCATGAATATGCA | 29 | 1930 |
| 1480602 | N/A | N/A | 212805 | 212824 | TAAGGATTTCACCTAAAGCA | 51 | 1931 |
| 1480628 | 2228 | 2247 | 116898 | 116917 | TAACACCTTGAATTTCATCC | 15 | 1932 |
| 1480661 | N/A | N/A | 217514 | 217533 | TCTGTAATTATGTACTCCTT | 26 | 1933 |
| 1480693 | N/A | N/A | 202115 | 202134 | CCATCCTACAAGCAAGATGA | 72 | 1934 |
| 1480696 | 1145 | 1164 | 23020 | 23039 | CAGTCATTATCTCATCAACA | 2 | 1935 |
| 1480701 | N/A | N/A | 109677 | 109696 | GATTTCTATCACACTTACTT | 60 | 1936 |
| 1480733 | N/A | N/A | 18302 | 18321 | AAGACGACTTACCTCTGCAT | 139 | 1937 |
| 1480737 | 3826 | 3845 | 224194 | 224213 | CCAATTATCTGAACTGAAAC | 38 | 1938 |
| 1480786 | N/A | N/A | 148547 | 148566 | GGTCAAGAAATTTCACTCAT | 22 | 1939 |
| 1480803 | N/A | N/A | 140831 | 140850 | ACTTACTGATAAATCTGTAT | 75 | 1940 |
| 1480830 | N/A | N/A | 85188 | 85207 | GAGTTCATAAATTCATCACT | 17 | 1941 |
| 1480841 | 1484 | 1503 | 73516 | 73535 | ACTCTGTAACTGCCTGGAAA | 9 | 1942 |
| 1480843 | 2860 | 2879 | 161708 | 161727 | ATCCACAATCCCAATTGTCG | 71 | 1943 |
| 1480949 | N/A | N/A | 160174 | 160193 | CCACACATTTCCAGTCTCCC | 44 | 1944 |
| 1480963 | N/A | N/A | 3493 | 3512 | CTTTATCCACCCAAACTGTA | 96 | 1945 |
| 1480986 | 2090 | 2109 | 116046 | 116065 | CAGGAATTTCTAAAATAACG | 28 | 1946 |
| 1480997 | 3524 | 3543 | 223892 | 223911 | GTTGGTATTTTTAATTCTCC | 18 | 1947 |
| 1481039 | N/A | N/A | 164782 | 164801 | CTGACAACTCCATTTATCTC | 49 | 1948 |
| 1481079 | N/A | N/A | 92603 | 92622 | CTTTTACCTTAATTTAAGGA | 51 | 1949 |
| 1481130 | N/A | N/A | 186976 | 186995 | CAAATTCTTATTTTAGGGCT | 48 | 1950 |
| 1481174 | N/A | N/A | 102853 | 102872 | TATTACTTCATCATTTGGGC | 19 | 1951 |
| 1481242 | 2992 | 3011 | 202228 | 202247 | TAGTTCATCCAAGATAACCA | 63 | 1952 |
| 1481256 | N/A | N/A | 36291 | 36310 | AGGTTATTCTTATTCCCCAA | 2 | 1953 |
| 1481318 | 2751 | 2770 | 161599 | 161618 | GGTCCGGTAATTATCATTAC | 46 | 1954 |
| 1481347 | N/A | N/A | 133105 | 133124 | TCCAAAGATTTCTACAGTGC | 17 | 1955 |
| 1481359 | N/A | N/A | 72684 | 72703 | AATCTGTTTCTATCACAGTC | 63 | 1956 |
| 1481365 | 4323 | 4342 | 224691 | 224710 | TTTCATGACCTTATTCCTTC | 20 | 1957 |
| 1481367 | N/A | N/A | 3171 | 3190 | AAACCTGCATAACCTTTGCC | 58 | 1958 |
| 1481397 | N/A | N/A | 182778 | 182797 | TGGACATACTTTTATTAGGC | 20 | 1959 |
| 1481398 | 3280 | 3299 | 221185 | 221204 | AGCCACATTTAATCCATAAC | 24 | 1960 |
| 1481428 | 457 | 476 | 13161 | 13180 | CTTTGAAACATTCCTGGTCC | 37 | 1961 |
| 1481448 | N/A | N/A | 57910 | 57929 | ACAGCACCTTTTTCACTCCA | 11 | 1962 |
| 1481503 | 2604 | 2623 | 135653 | 135672 | CTGCAGTAATCTCCTTGCTT | 95 | 1963 |
| 1481528 | N/A | N/A | 107153 | 107172 | CATTTCTTATCCCTACATTT | 52 | 1964 |
| 1481592 | 744 | 763 | 18181 | 18200 | ATGCTTTTGGACCGTTTGTT | 2 | 433 |
| 1481640 | N/A | N/A | 63362 | 63381 | TCCATTCAAGTCATCATCTC | 45 | 1965 |
| 1481642 | 876 | 895 | 20247 | 20266 | ATATTGAGCTCTCGGGCTGC | 36 | 1966 |

TABLE 31
Reduction of MSH3 RNA by 5-10-5 MOE gapmers with mixed internucleoside linkages in A431 cells

| | SEQ ID | SEQ ID | SEQ ID | SEQ ID | | | |
|---|---|---|---|---|---|---|---|
| | NO: 1 | NO: 1 | NO: 2 | NO: 2 | | MSH3 | SEQ |
| Compound | Start | Stop | Start | Stop | | (% | ID |
| Number | Site | Site | Site | Site | Sequence (5′ to 3′) | UTC) | No. |
| 1479801 | N/A | N/A | 76963 | 76982 | TTGGAGGAATCACTTACTCA | 86 | 1967 |
| 1479823 | N/A | N/A | 221834 | 221853 | GTACTGACTACATACTAGCT | 49 | 1968 |
| 1479843 | 1865 | 1884 | 109567 | 109586 | GGAGAACTTCCGATACAGCA | 11 | 1969 |
| 1479863 | 1745 | 1764 | 92517 | 92536 | ACAGCAAACTTCCTTTGGTT | 58 | 1970 |
| 1479874 | N/A | N/A | 117002 | 117021 | AAGTAAGCTTGACATTACCT | 77 | 1971 |
| 1479882 | N/A | N/A | 92601 | 92620 | TTTACCTTAATTTAAGGAGT | 78 | 1972 |
| 1479892 | N/A | N/A | 39245 | 39264 | CTGATCTTATATTTAATGGC | 3 | 1973 |
| 1479969 | N/A | N/A | 47811 | 47830 | AGATCCCATTAATATTTGCT | 9 | 1974 |
| 1479984 | N/A | N/A | 20235 | 20254 | CGGGCTGCAATCTAAAAAAT | 80 | 1975 |
| 1480070 | N/A | N/A | 112008 | 112027 | ACCAGATCATTTCTACTCTT | 21 | 1976 |
| 1480113 | N/A | N/A | 85187 | 85206 | AGTTCATAAATTCATCACTT | 9 | 1977 |
| 1480132 | 2598 | 2617 | 135647 | 135666 | TAATCTCCTTGCTTAGCGAC | 44 | 1978 |
| 1480137 | N/A | N/A | 3492 | 3511 | TTTATCCACCCAAACTGTAT | 68 | 1979 |
| 1480146 | N/A | N/A | 212804 | 212823 | AAGGATTTCACCTAAAGCAA | 73 | 1980 |
| 1480187 | N/A | N/A | 140830 | 140849 | CTTACTGATAAATCTGTATT | 87 | 1981 |
| 1480215 | N/A | N/A | 160119 | 160138 | GTGTAATTCCTTTCTCTTAA | 27 | 1982 |
| 1480222 | N/A | N/A | 20352 | 20371 | CCAAAGCTGACCTTATATCC | 82 | 1983 |
| 1480229 | N/A | N/A | 217394 | 217413 | ACTCTATTTCTTTACAGGCT | 47 | 1984 |
| 1480249 | N/A | N/A | 3519 | 3538 | AGTCACATCTATACCATCCT | 55 | 1985 |
| 1480258 | 4322 | 4341 | 224690 | 224709 | TTCATGACCTTATTCCTTCT | 20 | 1986 |
| 1480269 | N/A | N/A | 6388 | 6407 | ATTCTCTTCATCTATCACCC | 18 | 1987 |
| 1480273 | 2991 | 3010 | 202227 | 202246 | AGTTCATCCAAGATAACCAA | 66 | 1988 |
| 1480282 | N/A | N/A | 102815 | 102834 | ATACAACCATTAATACTCCA | 25 | 1989 |
| 1480342 | N/A | N/A | 14892 | 14911 | GCTGAACTCAATTTAACCTT | 12 | 1990 |
| 1480382 | N/A | N/A | 76367 | 76386 | GACTTCCAATTATCTGCACT | 55 | 1991 |
| 1480396 | 354 | 373 | 4447 | 4466 | TTAACAGGCCCATCATTTTC | 34 | 1992 |
| 1480457 | N/A | N/A | 178053 | 178072 | CACCACAGATCTCATGGGCA | 110 | 1993 |
| 1480491 | N/A | N/A | 70703 | 70722 | CATGTCTATTATATCCAACA | 7 | 1994 |
| 1480517 | N/A | N/A | 148485 | 148504 | GCAGCACACATCAAGGGTTC | 49 | 1995 |
| 1480519 | 1283 | 1302 | 26956 | 26975 | AGTCCTGGAAACTATCAAAC | 17† | 1996 |
| 1480540 | N/A | N/A | 18301 | 18320 | AGACGACTTACCTCTGCATC | 85 | 1997 |
| 1480552 | N/A | N/A | 63222 | 63241 | AAACAGGTACTCAACCTATA | 70 | 1998 |
| 1480564 | 1144 | 1163 | 23019 | 23038 | AGTCATTATCTCATCAACAT | 3 | 1999 |
| 1480601 | 1483 | 1502 | 73515 | 73534 | CTCTGTAACTGCCTGGAAAG | 13 | 2000 |
| 1480606 | N/A | N/A | 120096 | 120115 | CCACATTTCATTCAAGGTTA | 9 | 2001 |
| 1480640 | 1949 | 1968 | 109651 | 109670 | GATAAATGCTACAGAGTCCC | 43 | 2002 |
| 1480674 | N/A | N/A | 23877 | 23896 | ACCATAGTCATTCATGTTTA | 3 | 2003 |
| 1480729 | N/A | N/A | 3351 | 3370 | CTAAGGGCAGCTTTCTTCTA | 95 | 2004 |
| 1480756 | 3499 | 3518 | 223867 | 223886 | TTGTTCACAAATGTAGTCTT | 32 | 2005 |
| 1480775 | 2227 | 2246 | 116897 | 116916 | AACACCTTGAATTTCATCCT | 16 | 2006 |
| 1480826 | N/A | N/A | 57249 | 57268 | CCACAAATTCCATTAGCTCA | 14 | 2007 |
| 1480827 | 2859 | 2878 | 161707 | 161726 | TCCACAATCCCAATTGTCGC | 43 | 2008 |
| 1480831 | N/A | N/A | 99196 | 99215 | CTGATATCTTATCCCTGTTA | 43 | 2009 |
| 1480867 | 554 | 573 | 13258 | 13277 | TTGGCAGAACTGCAAATCTC | 19 | 2010 |
| 1480873 | N/A | N/A | 125401 | 125420 | GCATATTTCATTCATTAGCT | 15 | 2011 |
| 1480879 | N/A | N/A | 143280 | 143299 | ATGCATTATATACTACCAAC | 37 | 2012 |
| 1480910 | N/A | N/A | 167105 | 167124 | CTTCTACTCCATTCTACTGC | 24 | 2013 |
| 1480935 | N/A | N/A | 81066 | 81085 | TCTTGATTACTCACTTTGTA | 32 | 2014 |
| 1480973 | N/A | N/A | 36241 | 36260 | GCAGCATACACATCTATCTT | 3 | 2015 |
| 1481003 | 2357 | 2376 | 123717 | 123736 | TTGGTATACAAGATACAGCA | 31 | 2016 |
| 1481020 | 3079 | 3098 | N/A | N/A | CAGGGTTAAGGATTTCACAT | 22 | 2017 |
| 1481058 | 445 | 464 | 13149 | 13168 | CCTGGTCCTCAGACATTTCT | 21 | 2018 |
| 1481091 | N/A | N/A | 182776 | 182795 | GACATACTTTTATTAGGCAA | 13 | 2019 |
| 1481200 | N/A | N/A | 29366 | 29385 | ATCACCATTTCTCATATTAC | 51 | 2020 |
| 1481250 | 1703 | 1722 | 89518 | 89537 | GGATTTCCAGATTCCTTAAT | 44 | 2021 |
| 1481279 | 3732 | 3751 | 224100 | 224119 | ACTGGACTTACTGTCCATAA | 91 | 2022 |
| 1481305 | N/A | N/A | 63361 | 63380 | CCATTCAAGTCATCATCTCA | 44 | 2023 |
| 1481353 | N/A | N/A | 20844 | 20863 | GATATCTTCTCCAATAAGTG | 56 | 2024 |
| 1481375 | 2088 | 2107 | 116044 | 116063 | GGAATTTCTAAAATAACGGT | 11 | 2025 |
| 1481395 | N/A | N/A | 126820 | 126839 | CACTCTAGAAAATCAAGCCA | 58 | 2026 |
| 1481407 | 2656 | 2675 | 140765 | 140784 | AGGGTGCCTTCCATTTTTTA | 62 | 2027 |
| 1481429 | N/A | N/A | 132825 | 132844 | ACTTATCTATTTCTCACTGA | 61 | 2028 |
| 1481439 | 3792 | 3811 | 224160 | 224179 | AGTAAATTTTTATATCACCC | 17 | 2029 |
| 1481465 | N/A | N/A | 3170 | 3189 | AACCTGCATAACCTTTGCCT | 85 | 2030 |
| 1481496 | 3279 | 3298 | 221184 | 221203 | GCCACATTTAATCCATAACT | 53 | 2031 |
| 1481499 | 139 | 158 | 2786 | 2805 | TCGGCTCAAAACCGCTTGCC | 62 | 2032 |
| 1481506 | 745 | 764 | 18182 | 18201 | GATGCTTTTGGACCGTTTGT | 3 | 2033 |
| 1481523 | 2750 | 2769 | 161598 | 161617 | GTCCGGTAATTATCATTACT | 49 | 2034 |
| 1481546 | N/A | N/A | 186951 | 186970 | CTTGAACTTTTCTATGTATC | 72 | 2035 |
| 1481549 | N/A | N/A | 138681 | 138700 | TCTGCACTCTTCTTTTATAC | 64 | 2036 |
| 1481557 | 3175 | 3194 | 212907 | 212926 | TTCATCCTCACTGACCAAGA | 34 | 2037 |
| 1481561 | N/A | N/A | 171323 | 171342 | GTAAGCATTTCACCAGATTC | 25 | 2038 |
| 1481574 | N/A | N/A | 106595 | 106614 | GCAGTATGTTCACTATCAAT | 14 | 2039 |
| 1481592 | 744 | 763 | 18181 | 18200 | ATGCTTTTGGACCGTTTGTT | 3 | 433 |
| 1481598 | N/A | N/A | 202056 | 202075 | CCGAACATTATTTTATGAAC | 52 | 2040 |
| 1481625 | N/A | N/A | 164781 | 164800 | TGACAACTCCATTTATCTCA | 61 | 2041 |
| 1481629 | N/A | N/A | 3300 | 3319 | AGTAAAACTCTTCGACCACC | 72 | 2042 |
| 1481634 | N/A | N/A | 72488 | 72507 | CTTTCTTTATCATCTCACTC | 18 | 2043 |

TABLE 32
Reduction of MSH3 RNA by 5-10-5 MOE gapmers with mixed internucleoside linkages in A431 cells

| | SEQ ID | SEQ ID | SEQ ID | SEQ ID | | | |
|---|---|---|---|---|---|---|---|
| | NO: 1 | NO: 1 | NO: 2 | NO: 2 | | MSH3 | SEQ |
| Compound | Start | Stop | Start | Stop | | (% | ID |
| Number | Site | Site | Site | Site | Sequence (5′ to 3′) | UTC) | No. |
| 1479814 | N/A | N/A | 85052 | 85071 | TTGCATTTCTAAATCCTGCC | 46 | 2044 |
| 1479817 | N/A | N/A | 170750 | 170769 | CTGCCATTATCCCATTCTGT | 50 | 2045 |
| 1479830 | N/A | N/A | 212803 | 212822 | AGGATTTCACCTAAAGCAAT | 95 | 2046 |
| 1479833 | N/A | N/A | 221578 | 221597 | TCTTCAGTAACCTTTGGCAT | 31 | 2047 |
| 1479862 | 552 | 571 | 13256 | 13275 | GGCAGAACTGCAAATCTCTC | 6 | 2048 |
| 1479922 | N/A | N/A | 186939 | 186958 | TATGTATCTATTTCTTGGCA | 53 | 2049 |
| 1480020 | 138 | 157 | 2785 | 2804 | CGGCTCAAAACCGCTTGCCT | 132 | 2050 |
| 1480030 | 444 | 463 | 13148 | 13167 | CTGGTCCTCAGACATTTCTT | 55 | 28 |
| 1480084 | N/A | N/A | 148382 | 148401 | GTTGGCAATAACCACCTCTC | 69 | 2051 |
| 1480140 | N/A | N/A | 126819 | 126838 | ACTCTAGAAAATCAAGCCAT | 74 | 2052 |
| 1480151 | 1463 | 1482 | 73495 | 73514 | CATGGCTGTATTCAAAATAA | 30 | 2053 |
| 1480204 | 1135 | 1154 | 23010 | 23029 | CTCATCAACATTTACAGCAT | 19 | 2054 |
| 1480237 | N/A | N/A | 3169 | 3188 | ACCTGCATAACCTTTGCCTA | 72 | 2055 |
| 1480250 | N/A | N/A | 18300 | 18319 | GACGACTTACCTCTGCATCT | 183 | 2056 |
| 1480253 | N/A | N/A | 112003 | 112022 | ATCATTTCTACTCTTCACCC | 57 | 2057 |
| 1480290 | N/A | N/A | 106571 | 106590 | TTGGTTTTAACCCAACCTTC | 82 | 2058 |
| 1480305 | 1697 | 1716 | 89512 | 89531 | CCAGATTCCTTAATGTTGTT | 31 | 2059 |
| 1480310 | N/A | N/A | 217231 | 217250 | GCAAGATTTATATTTAAGCC | 51 | 2060 |
| 1480318 | N/A | N/A | 3491 | 3510 | TTATCCACCCAAACTGTATT | 82 | 2061 |
| 1480321 | N/A | N/A | 20126 | 20145 | AGGATTTGTACACTTAATCT | 102 | 2062 |
| 1480326 | N/A | N/A | 140829 | 140848 | TTACTGATAAATCTGTATTA | 101 | 2063 |
| 1480329 | N/A | N/A | 20351 | 20370 | CAAAGCTGACCTTATATCCT | 101 | 2064 |
| 1480337 | N/A | N/A | 47028 | 47047 | AGGAAACTCTTTATCCAGGC | 12 | 2065 |
| 1480371 | N/A | N/A | 143279 | 143298 | TGCATTATATACTACCAACA | 75 | 2066 |
| 1480377 | N/A | N/A | 36240 | 36259 | CAGCATACACATCTATCTTT | 3 | 2067 |
| 1480440 | 3731 | 3750 | 224099 | 224118 | CTGGACTTACTGTCCATAAA | 28 | 2068 |
| 1480479 | 4320 | 4339 | 224688 | 224707 | CATGACCTTATTCCTTCTGT | 19 | 2069 |
| 1480527 | 2047 | 2066 | 116003 | 116022 | GTGGGAATTAACAGCAGGTA | 14 | 2070 |
| 1480553 | N/A | N/A | 138678 | 138697 | GCACTCTTCTTTTATACCTT | 65 | 2071 |
| 1480567 | N/A | N/A | 14889 | 14908 | GAACTCAATTTAACCTTGTC | 38 | 2072 |
| 1480608 | N/A | N/A | 119870 | 119889 | GCCAATATTTACATAGAGAC | 10 | 2073 |
| 1480609 | 353 | 372 | 4446 | 4465 | TAACAGGCCCATCATTTTCC | 13 | 2074 |
| 1480618 | 3449 | 3468 | 223817 | 223836 | CTTCCATGTTGAACTCCTCT | 56 | 2075 |
| 1480635 | 2749 | 2768 | 161597 | 161616 | TCCGGTAATTATCATTACTC | 50 | 2076 |
| 1480669 | 1744 | 1763 | 92516 | 92535 | CAGCAAACTTCCTTTGGTTT | 41 | 2077 |
| 1480673 | 2596 | 2615 | 135645 | 135664 | ATCTCCTTGCTTAGCGACCT | 61 | 2078 |
| 1480675 | N/A | N/A | 3349 | 3368 | AAGGGCAGCTTTCTTCTAGT | 64 | 2079 |
| 1480678 | N/A | N/A | 202314 | 202333 | GTTTACCGGATACTTACATC | 78 | 2080 |
| 1480800 | N/A | N/A | 23777 | 23796 | ACATTGTCCACACATATGTC | 61 | 2081 |
| 1480801 | 3278 | 3297 | 221183 | 221202 | CCACATTTAATCCATAACTC | 44 | 2082 |
| 1480815 | 2352 | 2371 | 123712 | 123731 | ATACAAGATACAGCAGAGTT | 51 | 2083 |
| 1480828 | N/A | N/A | 76960 | 76979 | GAGGAATCACTTACTCAGGT | 108 | 2084 |
| 1480834 | 3791 | 3810 | 224159 | 224178 | GTAAATTTTTATATCACCCT | 28 | 2085 |
| 1480844 | 2858 | 2877 | 161706 | 161725 | CCACAATCCCAATTGTCGCT | 66 | 2086 |
| 1480846 | N/A | N/A | 96822 | 96841 | CTGGAACACAGACTCATCTC | 146 | 2087 |
| 1480859 | N/A | N/A | 20843 | 20862 | ATATCTTCTCCAATAAGTGT | 31 | 2088 |
| 1480862 | N/A | N/A | 124819 | 124838 | TGTCAAAATTTCCCTTCATC | 31 | 2089 |
| 1480890 | N/A | N/A | 76298 | 76317 | TCTGATCAATTTCATGTCTC | 111 | 2090 |
| 1480905 | 2988 | 3007 | 202224 | 202243 | TCATCCAAGATAACCAAGGA | 49 | 2091 |
| 1480939 | 1281 | 1300 | 26954 | 26973 | TCCTGGAAACTATCAAACAC | 52† | 2092 |
| 1480957 | 1864 | 1883 | 109566 | 109585 | GAGAACTTCCGATACAGCAT | 14 | 2093 |
| 1480960 | 2226 | 2245 | 116896 | 116915 | ACACCTTGAATTTCATCCTT | 39 | 2094 |
| 1481002 | N/A | N/A | 29365 | 29384 | TCACCATTTCTCATATTACC | 47 | 2095 |
| 1481023 | 3174 | 3193 | 212906 | 212925 | TCATCCTCACTGACCAAGAA | 46 | 2096 |
| 1481028 | N/A | N/A | 102814 | 102833 | TACAACCATTAATACTCCAA | 36 | 2097 |
| 1481088 | N/A | N/A | 70415 | 70434 | TTATGTATATTGATGTAGGT | 42 | 2098 |
| 1481093 | N/A | N/A | 177996 | 178015 | GCCATAAATTTCATATCCTA | 22 | 2099 |
| 1481106 | N/A | N/A | 63359 | 63378 | ATTCAAGTCATCATCTCAGT | 30 | 2100 |
| 1481109 | N/A | N/A | 63221 | 63240 | AACAGGTACTCAACCTATAA | 68 | 2101 |
| 1481117 | N/A | N/A | 55403 | 55422 | TGAACATATACTTACCCACA | 138 | 2102 |
| 1481167 | N/A | N/A | 39222 | 39241 | GCTGAATTCTTATTACTTCT | 2 | 2103 |
| 1481234 | N/A | N/A | 182710 | 182729 | AGCTGTTAAATCCTTTGTTC | 59 | 2104 |
| 1481264 | N/A | N/A | 80922 | 80941 | GCATCTTAACAACAACAGAC | 19 | 2105 |
| 1481333 | N/A | N/A | 6383 | 6402 | CTTCATCTATCACCCACTTC | 58 | 2106 |
| 1481354 | 2655 | 2674 | 140764 | 140783 | GGGTGCCTTCCATTTTTTAT | 87 | 2107 |
| 1481405 | 1945 | 1964 | 109647 | 109666 | AATGCTACAGAGTCCCCTCT | 112 | 2108 |
| 1481421 | N/A | N/A | 166965 | 166984 | GCACTGATTTCATACGCACA | 33 | 2109 |
| 1481447 | N/A | N/A | 117001 | 117020 | AGTAAGCTTGACATTACCTC | 87 | 2110 |
| 1481474 | N/A | N/A | 72484 | 72503 | CTTTATCATCTCACTCCCAT | 40 | 2111 |
| 1481491 | N/A | N/A | 160080 | 160099 | TTGCACCTAATATATCTCCA | 28 | 2112 |
| 1481497 | N/A | N/A | 202055 | 202074 | CGAACATTATTTTATGAACA | 65 | 2113 |
| 1481578 | N/A | N/A | 3299 | 3318 | GTAAAACTCTTCGACCACCA | 56 | 2114 |
| 1481592 | 744 | 763 | 18181 | 18200 | ATGCTTTTGGACCGTTTGTT | 2 | 433 |
| 1481595 | 743 | 762 | 18180 | 18199 | TGCTTTTGGACCGTTTGTTA | 8 | 2115 |
| 1481618 | N/A | N/A | 164691 | 164710 | TTCCACTTAAACTAGCACTA | 68 | 2116 |
| 1481636 | N/A | N/A | 131720 | 131739 | GGTCAATTTTTTTCTCACTC | 12 | 2117 |
| 1481638 | 1807 | 1826 | 92579 | 92598 | CTGGGTCACCCACTTCTTTA | 59 | 2118 |
| 1481648 | N/A | N/A | 3518 | 3537 | GTCACATCTATACCATCCTA | 53 | 2119 |

TABLE 33
Reduction of MSH3 RNA by 5-10-5 MOE gapmers with mixed internucleoside linkages
in A431 cells

| | SEQ ID | SEQ ID | SEQ ID | SEQ ID | | | |
|---|---|---|---|---|---|---|---|
| | NO: 1 | NO: 1 | NO: 2 | NO: 2 | | MSH3 | SEQ |
| Compound | Start | Stop | Start | Stop | | (% | ID |
| Number | Site | Site | Site | Site | Sequence (5′ to 3′) | UTC) | No. |
| 1479803 | 440 | 459 | 13144 | 13163 | TCCTCAGACATTTCTTTGGC | 34 | 2120 |
| 1479815 | N/A | N/A | 140699 | 140718 | TATGTTTCAATTTACTAGGC | 168 | 2121 |
| 1479836 | N/A | N/A | 216805 | 216824 | GCTGAACTATAAATTCGAAC | 42 | 2122 |
| 1479857 | N/A | N/A | 39219 | 39238 | GAATTCTTATTACTTCTGAT | 7 | 2123 |
| 1479870 | N/A | N/A | 166767 | 166786 | CTCATTTCATCTCTATCCTA | 32 | 2124 |
| 1479880 | N/A | N/A | 164517 | 164536 | TCAATAGTTTACCATGGCTC | 14 | 2125 |
| 1479890 | 2857 | 2876 | 161705 | 161724 | CACAATCCCAATTGTCGCTT | 68 | 2126 |
| 1479932 | N/A | N/A | 14728 | 14747 | CATCAAACAGCTTATCACCT | 111 | 2127 |
| 1479975 | 3789 | 3808 | 224157 | 224176 | AAATTTTTATATCACCCTCC | 37 | 2128 |
| 1479989 | N/A | N/A | 46651 | 46670 | CCAGCTTTATACACCCTTTC | 3 | 2129 |
| 1480109 | N/A | N/A | 76167 | 76186 | TCATTAGACTATTTTGCTCA | 29 | 2130 |
| 1480114 | 2595 | 2614 | 135644 | 135663 | TCTCCTTGCTTAGCGACCTT | 50 | 2131 |
| 1480169 | 1943 | 1962 | 109645 | 109664 | TGCTACAGAGTCCCCTCTCT | 48 | 2132 |
| 1480179 | N/A | N/A | 201942 | 201961 | TGTCTAACATCATACTGTAC | 85 | 2133 |
| 1480251 | N/A | N/A | 54574 | 54593 | TGACACAATCATCCTAACAC | 32 | 2134 |
| 1480286 | 2225 | 2244 | 116895 | 116914 | CACCTTGAATTTCATCCTTC | 45 | 2135 |
| 1480299 | 1742 | 1761 | 92514 | 92533 | GCAAACTTCCTTTGGTTTTC | 32 | 2136 |
| 1480304 | N/A | N/A | 123407 | 123426 | ATGGCTTTTTCATTAACCAC | 48 | 2137 |
| 1480312 | N/A | N/A | 117000 | 117019 | GTAAGCTTGACATTACCTCC | 83 | 2138 |
| 1480356 | N/A | N/A | 20350 | 20369 | AAAGCTGACCTTATATCCTT | 79 | 2139 |
| 1480395 | 2987 | 3006 | 202223 | 202242 | CATCCAAGATAACCAAGGAC | 136 | 2140 |
| 1480402 | 1446 | 1465 | 73478 | 73497 | TAAATGTTATCCATCCTTTC | 19 | 2141 |
| 1480413 | N/A | N/A | 175853 | 175872 | CCTCCTTCATCATACCTACT | 86 | 2142 |
| 1480420 | 352 | 371 | 4445 | 4464 | AACAGGCCCATCATTTTCCA | 11 | 2143 |
| 1480426 | N/A | N/A | 3298 | 3317 | TAAAACTCTTCGACCACCAA | 72 | 2144 |
| 1480439 | 3446 | 3465 | 223814 | 223833 | CCATGTTGAACTCCTCTGTC | 41 | 2145 |
| 1480441 | N/A | N/A | 5859 | 5878 | GTGGCAAATTCTCTCAAGTC | 25 | 2146 |
| 1480464 | 2748 | 2767 | 161596 | 161615 | CCGGTAATTATCATTACTCT | 37 | 2147 |
| 1480470 | 1130 | 1149 | 23005 | 23024 | CAACATTTACAGCATCATCC | 2 | 2148 |
| 1480512 | N/A | N/A | 160079 | 160098 | TGCACCTAATATATCTCCAT | 85 | 2149 |
| 1480524 | N/A | N/A | 182709 | 182728 | GCTGTTAAATCCTTTGTTCA | 39 | 2150 |
| 1480532 | N/A | N/A | 63357 | 63376 | TCAAGTCATCATCTCAGTGA | 33 | 2151 |
| 1480544 | 2033 | 2052 | 115989 | 116008 | CAGGTATTATTGCTTGAAAT | 14 | 2152 |
| 1480568 | 551 | 570 | 13255 | 13274 | GCAGAACTGCAAATCTCTCC | 10 | 2153 |
| 1480593 | N/A | N/A | 186938 | 186957 | ATGTATCTATTTCTTGGCAT | 32 | 2154 |
| 1480616 | N/A | N/A | 3168 | 3187 | CCTGCATAACCTTTGCCTAT | 145 | 2155 |
| 1480622 | 742 | 761 | 18179 | 18198 | GCTTTTGGACCGTTTGTTAG | 3 | 2156 |
| 1480631 | 2497 | 2516 | 126818 | 126837 | CTCTAGAAAATCAAGCCATT | 28 | 2157 |
| 1480636 | 3173 | 3192 | 212905 | 212924 | CATCCTCACTGACCAAGAAT | 85 | 2158 |
| 1480644 | N/A | N/A | 119761 | 119780 | ACTGGATTTACAGACTGGCA | 10 | 2159 |
| 1480652 | N/A | N/A | 63220 | 63239 | ACAGGTACTCAACCTATAAA | 56 | 2160 |
| 1480708 | N/A | N/A | 143278 | 143297 | GCATTATATACTACCAACAA | 22 | 2161 |
| 1480722 | N/A | N/A | 212797 | 212816 | TCACCTAAAGCAATAAGACA | 90 | 2162 |
| 1480730 | N/A | N/A | 96821 | 96840 | TGGAACACAGACTCATCTCA | 90 | 2163 |
| 1480761 | N/A | N/A | 29364 | 29383 | CACCATTTCTCATATTACCA | 25 | 2164 |
| 1480794 | 1280 | 1299 | 26953 | 26972 | CCTGGAAACTATCAAACACA | 16† | 2165 |
| 1480798 | N/A | N/A | 202313 | 202332 | TTTACCGGATACTTACATCT | 75 | 2166 |
| 1480808 | 1685 | 1704 | 89500 | 89519 | ATGTTGTTCCATTAATTGTC | 9 | 2167 |
| 1480825 | N/A | N/A | 148380 | 148399 | TGGCAATAACCACCTCTCCA | 61 | 2168 |
| 1480842 | 3277 | 3296 | 221182 | 221201 | CACATTTAATCCATAACTCC | 54 | 2169 |
| 1480889 | 3725 | 3744 | 224093 | 224112 | TTACTGTCCATAAAATTTTC | 126 | 2170 |
| 1480948 | N/A | N/A | 36238 | 36257 | GCATACACATCTATCTTTGA | 3 | 2171 |
| 1480988 | N/A | N/A | 85051 | 85070 | TGCATTTCTAAATCCTGCCA | 42 | 2172 |
| 1481104 | N/A | N/A | 23218 | 23237 | TCTGAAGGTACACTTCATCA | 16 | 2173 |
| 1481114 | N/A | N/A | 3490 | 3509 | TATCCACCCAAACTGTATTT | 81 | 2174 |
| 1481116 | 4318 | 4337 | 224686 | 224705 | TGACCTTATTCCTTCTGTGC | 18 | 2175 |
| 1481131 | N/A | N/A | 102698 | 102717 | AAAGATCTATTTCCTAACAC | 85 | 2176 |
| 1481135 | N/A | N/A | 124818 | 124837 | GTCAAAATTTCCCTTCATCC | 11 | 2177 |
| 1481149 | 137 | 156 | 2784 | 2803 | GGCTCAAAACCGCTTGCCTC | 79 | 2178 |
| 1481169 | N/A | N/A | 131315 | 131334 | ATGCAGATAACAATCTGGTA | 72 | 2179 |
| 1481177 | 2712 | 2731 | 140821 | 140840 | AAATCTGTATTATTTGGGAC | 43 | 2180 |
| 1481284 | N/A | N/A | 138266 | 138285 | ACTGAAGATCACTTCTTGTC | 55 | 2181 |
| 1481287 | 1806 | 1825 | 92578 | 92597 | TGGGTCACCCACTTCTTTAA | 49 | 2182 |
| 1481293 | N/A | N/A | 72415 | 72434 | TTCATGTTCATATTTTGGTC | 5 | 2183 |
| 1481383 | N/A | N/A | 19348 | 19367 | CCAAGTCTTTACTTCCCATC | 91 | 2184 |
| 1481400 | N/A | N/A | 20842 | 20861 | TATCTTCTCCAATAAGTGTA | 23 | 2185 |
| 1481418 | N/A | N/A | 170490 | 170509 | GCACTATACTCACACATATA | 84 | 2186 |
| 1481435 | N/A | N/A | 70413 | 70432 | ATGTATATTGATGTAGGTAT | 13 | 2187 |
| 1481445 | N/A | N/A | 3348 | 3367 | AGGGCAGCTTTCTTCTAGTC | 55 | 2188 |
| 1481464 | N/A | N/A | 111999 | 112018 | TTTCTACTCTTCACCCTTCA | 54 | 2189 |
| 1481498 | N/A | N/A | 76958 | 76977 | GGAATCACTTACTCAGGTTT | 51 | 2190 |
| 1481541 | N/A | N/A | 3517 | 3536 | TCACATCTATACCATCCTAA | 79 | 2191 |
| 1481582 | 1863 | 1882 | 109565 | 109584 | AGAACTTCCGATACAGCATC | 13 | 2192 |
| 1481588 | N/A | N/A | 18295 | 18314 | CTTACCTCTGCATCTTCCCC | 36 | 2193 |
| 1481592 | 744 | 763 | 18181 | 18200 | ATGCTTTTGGACCGTTTGTT | 3 | 433 |
| 1481599 | N/A | N/A | 106459 | 106478 | CTTGTCCTAGTTTCTCCACC | 41 | 2194 |
| 1481605 | N/A | N/A | 80723 | 80742 | CCAGATTTTTAAACCAAGCC | 11 | 2195 |
| 1481644 | N/A | N/A | 221287 | 221306 | GCAGCATAATCACTCTGACC | 36 | 2196 |

### Example 5: Effect of Modified Oligonucleotides on Human MSH3 RNA In Vitro, Multiple Doses

[0347] Modified oligonucleotides selected from the examples above were tested at various doses in A-431 cells. Cultured A-431 cells at a density of 10,000 cells per well were treated using free uptake with various concentrations of modified oligonucleotide as specified in the tables below. After a treatment period of approximately 48 hours, total RNA was isolated from the cells and MSH3 RNA levels were measured by quantitative real-time RTPCR. Human MSH3 primer probe set RTS40982 was used to measure RNA levels as described above. MSH3 levels were normalized to total RNA content, as measured by RIBOGREEN®. Results are presented in Tables 34-40 below as percent MSH3 RNA, relative to untreated control cells (% UTC). Each table represents results from an individual assay plate. Where possible, the half maximal inhibitory concentration (IC₅₀) of each modified oligonucleotide was calculated using a linear regression on a log/linear plot of the data in excel.

TABLE 34
Dose-dependent reduction of human MSH3 RNA
in A-431 cells by modified oligonucleotides

| Compound | MSH3 (% UTC) | | | | IC₅₀ |
|---|---|---|---|---|---|
| Number | 62.5 nM | 250 nM | 1000 nM | 4000 nM | (μM) |
| 1479925 | 38 | 23 | 11 | 6 | 0.01 |
| 1479968 | 64 | 67 | 47 | 34 | 0.74 |
| 1480033 | 48 | 36 | 17 | 10 | 0.05 |
| 1480079 | 50 | 47 | 32 | 17 | 0.10 |
| 1480142 | 55 | 30 | 29 | 21 | 0.06 |
| 1480288 | 57 | 56 | 41 | 34 | 0.30 |
| 1480338 | 40 | 26 | 20 | 9 | 0.01 |
| 1480467 | 107 | 66 | 44 | 24 | 0.84 |
| 1480536 | 100 | 53 | 24 | 10 | 0.43 |
| 1480577 | 66 | 58 | 63 | 41 | 2.01 |
| 1480768 | 65 | 54 | 51 | 34 | 0.56 |
| 1480932 | 56 | 36 | 28 | 21 | 0.08 |
| 1480942 | 81 | 65 | 43 | 22 | 0.61 |
| 1481046 | 57 | 31 | 15 | 7 | 0.07 |
| 1481389 | 63 | 62 | 68 | 50 | >4.00 |
| 1481413 | 89 | 74 | 57 | 32 | 1.32 |
| 1481454 | 65 | 58 | 45 | 33 | 0.52 |
| 1481531 | 55 | 49 | 39 | 27 | 0.16 |
| 1481592 | 68 | 33 | 14 | 7 | 0.13 |

TABLE 35
Dose-dependent reduction of human MSH3 RNA
in A-431 cells by modified oligonucleotides

| Compound | MSH3 (% UTC) | | | | IC₅₀ |
|---|---|---|---|---|---|
| Number | 62.5 nM | 250 nM | 1000 nM | 4000 nM | (μM) |
| 1479889 | 74 | 51 | 28 | 12 | 0.28 |
| 1480141 | 65 | 60 | 51 | 30 | 0.61 |
| 1480220 | 62 | 42 | 26 | 15 | 0.15 |
| 1480294 | 82 | 70 | 45 | 26 | 0.77 |
| 1480476 | 95 | 57 | 27 | 12 | 0.45 |
| 1480533 | 105 | 61 | 29 | 13 | 0.54 |
| 1480551 | 57 | 40 | 21 | 15 | 0.10 |
| 1480688 | 60 | 53 | 38 | 25 | 0.25 |
| 1480759 | 56 | 52 | 42 | 40 | 0.28 |
| 1480770 | 63 | 53 | 39 | 33 | 0.33 |
| 1480790 | 29 | 13 | 5 | 2 | 0.00 |
| 1480878 | 51 | 39 | 23 | 11 | 0.07 |
| 1480900 | 46 | 33 | 16 | 8 | 0.04 |
| 1481095 | 82 | 62 | 42 | 20 | 0.55 |
| 1481137 | 58 | 47 | 36 | 24 | 0.18 |
| 1481152 | 58 | 57 | 52 | 38 | 0.66 |
| 1481374 | 52 | 51 | 32 | 23 | 0.12 |
| 1481558 | 58 | 43 | 34 | 22 | 0.14 |
| 1481592 | 72 | 37 | 15 | 7 | 0.17 |

TABLE 36
Dose-dependent reduction of human MSH3 RNA
in A-431 cells by modified oligonucleotides

| Compound | MSH3 (% UTC) | | | | IC₅₀ |
|---|---|---|---|---|---|
| Number | 62.5 nM | 250 nM | 1000 nM | 4000 nM | (μM) |
| 1479847 | 73 | 58 | 30 | 16 | 0.34 |
| 1480122 | 77 | 68 | 45 | 35 | 0.88 |
| 1480428 | 58 | 57 | 42 | 26 | 0.30 |
| 1480472 | 83 | 51 | 24 | 11 | 0.32 |
| 1480487 | 70 | 52 | 28 | 14 | 0.26 |
| 1480495 | 76 | 69 | 51 | 36 | 1.09 |
| 1480501 | 79 | 61 | 31 | 15 | 0.40 |
| 1480665 | 75 | 62 | 50 | 32 | 0.80 |
| 1480848 | 57 | 39 | 24 | 13 | 0.10 |
| 1480903 | 94 | 69 | 53 | 28 | 1.03 |
| 1480925 | 97 | 68 | 37 | 24 | 0.72 |
| 1480955 | 60 | 41 | 31 | 16 | 0.15 |
| 1480989 | 59 | 47 | 37 | 20 | 0.18 |
| 1481055 | 71 | 67 | 49 | 38 | 1.04 |
| 1481304 | 106 | 100 | 93 | 90 | >4.00 |
| 1481408 | 48 | 34 | 15 | 11 | 0.04 |
| 1481449 | 77 | 50 | 24 | 11 | 0.28 |
| 1481592 | 61 | 42 | 17 | 10 | 0.13 |
| 1481603 | 52 | 52 | 32 | 24 | 0.13 |

TABLE 37
Dose-dependent reduction of human MSH3 RNA
in A-431 cells by modified oligonucleotides

| Compound | MSH3 (% UTC) | | | | IC₅₀ |
|---|---|---|---|---|---|
| Number | 62.5 nM | 250 nM | 1000 nM | 4000 nM | (μM) |
| 1479938 | 59 | 22 | 23 | 15 | 0.06 |
| 1480003 | 89 | 50 | 31 | 12 | 0.39 |
| 1480223 | 55 | 29 | 15 | 7 | 0.07 |
| 1480316 | 55 | 39 | 25 | 16 | 0.09 |
| 1480330 | 64 | 47 | 28 | 21 | 0.20 |
| 1480463 | 95 | 74 | 43 | 24 | 0.84 |
| 1480494 | 34 | 21 | 12 | 6 | 0.00 |
| 1480541 | 67 | 88 | 70 | 60 | >4.00 |
| 1480543 | 49 | 31 | 16 | 10 | 0.04 |
| 1480810 | 83 | 75 | 66 | 42 | 2.80 |
| 1481022 | 60 | 52 | 42 | 24 | 0.25 |
| 1481050 | 65 | 59 | 50 | 37 | 0.72 |
| 1481068 | 60 | 48 | 32 | 19 | 0.18 |
| 1481103 | 89 | 93 | 76 | 58 | >4.00 |
| 1481156 | 78 | 55 | 40 | 19 | 0.43 |
| 1481176 | 120 | 96 | 46 | 33 | 1.42 |
| 1481193 | 118 | 89 | 56 | 32 | 1.57 |
| 1481470 | 73 | 58 | 48 | 24 | 0.54 |
| 1481592 | 73 | 41 | 18 | 10 | 0.19 |

TABLE 38
Dose-dependent reduction of human MSH3 RNA
in A-431 cells by modified oligonucleotides

| Compound | MSH3 (% UTC) | | | | IC₅₀ |
|---|---|---|---|---|---|
| Number | 62.5 nM | 250 nM | 1000 nM | 4000 nM | (μM) |
| 1479835 | 57 | 34 | 16 | 6 | 0.08 |
| 1479892 | 66 | 40 | 22 | 12 | 0.16 |
| 1479901 | 60 | 35 | 20 | 11 | 0.11 |
| 1480166 | 58 | 37 | 22 | 11 | 0.10 |
| 1480202 | 73 | 63 | 48 | 25 | 0.60 |
| 1480366 | 60 | 43 | 19 | 10 | 0.13 |
| 1480466 | 85 | 69 | 50 | 33 | 1.03 |
| 1480482 | 43 | 35 | 10 | 5 | 0.04 |
| 1480564 | 78 | 49 | 33 | 12 | 0.32 |
| 1480674 | 67 | 44 | 24 | 11 | 0.18 |
| 1480899 | 66 | 40 | 20 | 9 | 0.16 |
| 1480973 | 68 | 43 | 29 | 14 | 0.21 |
| 1481146 | 61 | 38 | 22 | 9 | 0.12 |
| 1481330 | 34 | 14 | 7 | 4 | 0.00 |
| 1481471 | 75 | 61 | 39 | 18 | 0.45 |
| 1481500 | 68 | 44 | 29 | 17 | 0.21 |
| 1481506 | 35 | 18 | 9 | 5 | 0.01 |
| 1481592 | 56 | 30 | 14 | 8 | 0.07 |
| 1481624 | 74 | 58 | 39 | 22 | 0.43 |

TABLE 39
Dose-dependent reduction of human MSH3 RNA
in A-431 cells by modified oligonucleotides

| Compound | MSH3 (% UTC) | | | | IC₅₀ |
|---|---|---|---|---|---|
| Number | 62.5 nM | 250 nM | 1000 nM | 4000 nM | (μM) |
| 1479878 | 100 | 77 | 52 | 26 | 1.10 |
| 1479915 | 93 | 78 | 60 | 35 | 1.63 |
| 1479989 | 77 | 54 | 35 | 17 | 0.37 |
| 1480037 | 96 | 76 | 52 | 23 | 0.99 |
| 1480039 | 46 | 19 | 13 | 6 | 0.02 |
| 1480105 | 97 | 74 | 40 | 23 | 0.80 |
| 1480280 | 87 | 65 | 36 | 17 | 0.54 |
| 1480390 | 58 | 38 | 18 | 10 | 0.10 |
| 1480470 | 93 | 73 | 51 | 26 | 1.00 |
| 1480490 | 78 | 58 | 38 | 22 | 0.48 |
| 1480521 | 63 | 39 | 28 | 16 | 0.15 |
| 1480580 | 82 | 67 | 51 | 33 | 1.01 |
| 1480622 | 49 | 34 | 19 | 8 | 0.05 |
| 1480696 | 69 | 36 | 18 | 6 | 0.15 |
| 1480948 | 80 | 62 | 35 | 19 | 0.47 |
| 1481256 | 45 | 21 | 9 | 4 | 0.02 |
| 1481356 | 63 | 44 | 24 | 12 | 0.16 |
| 1481371 | 73 | 54 | 39 | 19 | 0.37 |
| 1481592 | 55 | 32 | 15 | 8 | 0.07 |

TABLE 40
Dose-dependent reduction of human MSH3 RNA
in A-431 cells by modified oligonucleotides

| Compound | MSH3 (% UTC) | | | | IC₅₀ |
|---|---|---|---|---|---|
| Number | 62.5 nM | 250 nM | 1000 nM | 4000 nM | (μM) |
| 1479857 | 78 | 72 | 65 | 47 | 4.29 |
| 1479862 | 63 | 39 | 21 | 12 | 0.13 |
| 1479993 | 131 | 94 | 80 | 51 | 4.17 |
| 1479996 | 69 | 68 | 58 | 44 | 2.50 |
| 1480011 | 46 | 27 | 10 | 4 | 0.03 |
| 1480377 | 61 | 55 | 32 | 16 | 0.23 |
| 1480386 | 74 | 58 | 29 | 12 | 0.33 |
| 1480484 | 101 | 55 | 31 | 14 | 0.51 |
| 1480589 | 66 | 54 | 49 | 33 | 0.56 |
| 1481027 | 81 | 68 | 60 | 31 | 1.22 |
| 1481139 | 64 | 54 | 40 | 23 | 0.31 |
| 1481160 | 108 | 58 | 31 | 18 | 0.60 |
| 1481167 | 42 | 26 | 10 | 4 | 0.02 |
| 1481293 | 93 | 65 | 35 | 23 | 0.64 |
| 1481335 | 56 | 44 | 29 | 19 | 0.12 |
| 1481396 | 57 | 36 | 19 | 6 | 0.09 |
| 1481564 | 76 | 76 | 45 | 46 | 1.76 |
| 1481592 | 80 | 34 | 15 | 7 | 0.20 |
| 1481595 | 53 | 36 | 23 | 13 | 0.07 |

### Example 6: Effects of 5-10-5 MOE Modified Oligonucleotides on Human MSH3 In Vitro, Single Dose

[0348] Modified oligonucleotides complementary to an MSH3 nucleic acid were synthesized and tested for their effect on MSH3 RNA levels in vitro. The modified oligonucleotides were tested in a series of experiments using the same culture conditions.

[0349] The modified oligonucleotides in Tables 41 to 66 below are 5-10-5 MOE modified oligonucleotides (i.e., they have a central gap segment of ten 2′-β-D-deoxynucleosides flanked on each side by wing segments, each wing segment consisting of five 2′-MOE modified nucleosides). The internucleoside linkage motif for the modified oligonucleotides is (from 5′ to 3′): sooosssssssssssooss; wherein each ‘o’ represents a phosphodiester internucleoside linkage and each ‘s’ represents a phosphorothioate internucleoside linkage. All cytosine nucleobases throughout each modified oligonucleotide are 5-methylcytosines.

[0350] “Start site” indicates the 5′-most nucleoside of the target sequence to which the modified oligonucleotide is complementary. “Stop site” indicates the 3′-most nucleoside of the target sequence to which the modified oligonucleotide is complementary. As shown in the tables below, the modified oligonucleotides are complementary to either SEQ ID NO: 1 (described herein above), to SEQ ID NO: 2 (described herein above), or to both.

[0351] Cultured A431 cells were treated using free uptake with 3000 nM of modified oligonucleotide. After a treatment period of approximately 48 hours, RNA was isolated from the cells and MSH3 RNA levels were measured by quantitative real-time RTPCR. Human primer probe set RTS40982 (described herein above) was used to measure RNA levels. MSH3 RNA levels were normalized to total RNA content, as measured by RIBOGREEN®. Results are presented as percent MSH3 RNA, relative to untreated control cells (% UTC). The values marked by the symbol “†” indicate that the modified oligonucleotide is complementary to the amplicon region of the primer probe set. Additional assays may be used to measure the potency and efficacy of the modified oligonucleotides complementary to the amplicon region.

TABLE 41
Reduction of MSH3 RNA by 5-10-5 MOE modified oligonucleotides with mixed PO/PS
internucleoside linkages in A431 cells

| | SEQ ID | SEQ ID | SEQ ID | SEQ ID | | | |
|---|---|---|---|---|---|---|---|
| | NO: 1 | NO: 1 | NO: 2 | NO: 2 | | MSH3 | SEQ |
| Compound | Start | Stop | Start | Stop | | (% | ID |
| Number | Site | Site | Site | Site | Sequence (5′ to 3′) | UTC) | No. |
| 1480790 | N/A | N/A | 35860 | 35879 | TCCGCTTTTTCCTTTAGGGA | 1 | 1008 |
| 1566447 | N/A | N/A | 70287 | 70306 | CCCTATGCAGAACACTTTCT | 60 | 2197 |
| 1566473 | N/A | N/A | 77917 | 77936 | CTGAGATAGCACCTATCTCC | 64 | 2198 |
| 1566543 | N/A | N/A | 6516 | 6535 | GCCATTTTTAACAAGTGGCA | 96 | 2199 |
| 1566623 | N/A | N/A | 23145 | 23164 | CATCTAACATTTGTTCCTCA | 43 | 2200 |
| 1566710 | N/A | N/A | 27340 | 27359 | GATCTCACCTTAGTTGCCCA | 15 | 2201 |
| 1566711 | N/A | N/A | 29036 | 29055 | TTACCATTTCTAGCAAGCAA | 21 | 2202 |
| 1566712 | N/A | N/A | 41354 | 41373 | TGTGCATGTATATCTATATA | 57 | 2203 |
| | | | 41384 | 41403 | | | |
| | | | 41414 | 41433 | | | |
| 1566715 | N/A | N/A | 125789 | 125808 | TGTCTGGTCTTTTTTTGCTC | 17 | 2204 |
| 1566746 | N/A | N/A | 14687 | 14706 | CGTGCCCCCTCTGTCTACTT | 102 | 2205 |
| 1566760 | N/A | N/A | 26339 | 26358 | TCATGCCAACTTGAACCTGC | 86 | 2206 |
| 1566847 | N/A | N/A | 80396 | 80415 | CCACATGTTATCATTCTGTT | 8 | 2207 |
| 1566881 | N/A | N/A | 131679 | 131698 | GCCCAGGTCCTCAAGACTCT | 67 | 2208 |
| 1566884 | N/A | N/A | 27702 | 27721 | CTCTGCCAGACATATATCAT | 45 | 2209 |
| 1566964 | N/A | N/A | 118591 | 118610 | GTAACTTATCTAACTACTCC | 63 | 2210 |
| 1566970 | N/A | N/A | 35925 | 35944 | ATTCTTGCTCCTATTCCCAA | 35 | 2211 |
| 1567032 | N/A | N/A | 99767 | 99786 | GTCCTTATCCCTCTACCTCA | 34 | 2212 |
| 1567038 | N/A | N/A | 177606 | 177625 | CAACAATGTATAAAAAGAAA | 64 | 2213 |
| | | | 205267 | 205286 | | | |
| 1567053 | 3001 | 3020 | 202237 | 202256 | CCCTCTTCCTAGTTCATCCA | 58 | 2214 |
| 1567058 | 3433 | 3452 | 223801 | 223820 | CTCTGTCCACTTCTGCAGGT | 110 | 2215 |
| 1567062 | 924 | 943 | 20295 | 20314 | TGAGTAGGTATACTTGCTGT | 12 | 2216 |
| 1567113 | N/A | N/A | 187811 | 187830 | GATTTGCTTTAGTTTCCTCC | 39 | 2217 |
| 1567132 | N/A | N/A | 22375 | 22394 | TCCCAGATATAGCAAGACAA | 46 | 2218 |
| 1567172 | N/A | N/A | 213267 | 213286 | GCAGGTGACTGTCATCTGTA | 55 | 2219 |
| 1567182 | N/A | N/A | 17345 | 17364 | GCCACTCTGTCACTGCCAAC | 30 | 2220 |
| 1567263 | N/A | N/A | 102493 | 102512 | TCCACTACTTGTATCTCTTC | 44 | 2221 |
| 1567297 | N/A | N/A | 106461 | 106480 | GCCTTGTCCTAGTTTCTCCA | 41 | 2222 |
| 1567328 | N/A | N/A | 122661 | 122680 | CTCCATAATCCATCCATGTT | 31 | 2223 |
| 1567340 | N/A | N/A | 110056 | 110075 | AGCAGATTTTTCCATAGTTT | 9 | 2224 |
| 1567342 | N/A | N/A | 19313 | 19332 | TGCTACCTCATCACTCTCTA | 60 | 2225 |
| 1567404 | N/A | N/A | 86570 | 86589 | CAGTTGCCTCCTCCCTCATA | 95 | 2226 |
| 1567444 | N/A | N/A | 63308 | 63327 | GCTCTGCTCACTAGGATCCA | 48 | 2227 |
| 1567511 | N/A | N/A | 23803 | 23822 | GCTTAGTGTTTTATTCTGCT | 33 | 2228 |
| 1567604 | N/A | N/A | 149441 | 149460 | TGGCTTTCTTAGTAAGCCCT | 60 | 2229 |
| 1567607 | N/A | N/A | 36200 | 36219 | AAGCATTTATTTCAAAGGTC | 1 | 2230 |
| 1567609 | N/A | N/A | 39227 | 39246 | GCATTGCTGAATTCTTATTA | 25 | 2231 |
| 1567619 | N/A | N/A | 36917 | 36936 | ATGACTTCATATGAACCCAC | 12 | 2232 |
| 1567640 | N/A | N/A | 13710 | 13729 | TTGCCCATCATGATTTTCCA | 41 | 2233 |
| 1567714 | N/A | N/A | 25072 | 25091 | TTCTAAGTATCTCTGTTCAA | 12 | 2234 |
| 1567746 | N/A | N/A | 93622 | 93641 | GTTCTCTTCACCATCACACC | 56 | 2235 |
| 1567747 | N/A | N/A | 90721 | 90740 | CGGCAGGACAGATTCTCAGC | 40 | 2236 |
| 1567761 | N/A | N/A | 30067 | 30086 | CGCTTAGTCCAATATGCAAA | 32 | 2237 |
| 1567769 | N/A | N/A | 141633 | 141652 | TGCTATGCTTCACTTCCAAT | 65 | 2238 |
| 1567899 | N/A | N/A | 40547 | 40566 | TACATGTTTATCTCTCTATA | 81 | 2239 |
| | | | 40575 | 40594 | | | |
| 1568040 | N/A | N/A | 84955 | 84974 | ATGGTATATACACAGGACTC | 25 | 2240 |
| 1568072 | N/A | N/A | 144447 | 144466 | TCACCATAGCAACAGTTCTA | 41 | 2241 |
| 1568077 | N/A | N/A | 164751 | 164770 | CCCTATCTATCGCCAAGTCC | 67 | 2242 |
| 1568268 | N/A | N/A | 117342 | 117361 | GTATCATTTCATCATCTGCA | 9 | 2243 |
| 1568271 | N/A | N/A | 167159 | 167178 | GCATAACTCCACCTCTGTGC | 67 | 2244 |
| 1568280 | N/A | N/A | 112004 | 112023 | GATCATTTCTACTCTTCACC | 37 | 2245 |
| 1568288 | N/A | N/A | 180700 | 180719 | TTACCATTTTAGCATTTCTT | 16 | 2246 |
| | | | 182448 | 182467 | | | |
| 1568303 | N/A | N/A | 53398 | 53417 | ATGCTTTCACCGTCTGGTAC | 40 | 2247 |
| 1568341 | N/A | N/A | 19661 | 19680 | GCCATGGAACTCTAATTCTA | 69 | 2248 |
| 1568405 | N/A | N/A | 50868 | 50887 | GCTGCTTGCCATCATGCGCA | 97 | 2249 |
| 1568953 | N/A | N/A | 72517 | 72536 | TTGACTCCCTATTCTGTCCT | 95 | 2250 |
| 1568979 | N/A | N/A | 183298 | 183317 | CCCCAGACAGTCTCTCAGTC | 60 | 2251 |
| 1568985 | N/A | N/A | 82172 | 82191 | ATGTCTTTCAACTACCATAA | 46 | 2252 |
| 1569014 | N/A | N/A | 139833 | 139852 | GTCTACCCTTTCCAACCTTC | 45 | 2253 |
| 1569242 | N/A | N/A | 35711 | 35730 | ATAGGCCTTCACCCTTTCTT | 48 | 2254 |
| 1569360 | N/A | N/A | 26054 | 26073 | ACTTCTGACAACAGCAAGGC | 32 | 2255 |
| 1569377 | N/A | N/A | 21027 | 21046 | AAGATGCTTGTTTCCAGCCA | 9 | 2256 |
| 1569382 | N/A | N/A | 12035 | 12054 | TGGATCCCTACCATGTACTA | 81 | 2257 |
| 1569797 | N/A | N/A | 76033 | 76052 | CAGTTACTCTGTTCCAGCAC | 44 | 2258 |
| 1569846 | N/A | N/A | 161284 | 161303 | GTGCATATTCTCCCTATTGC | 51 | 2259 |
| 1569901 | N/A | N/A | 44230 | 44249 | TGCTGGCCAATACTGAGGCT | 85 | 2260 |
| 1569929 | N/A | N/A | 36595 | 36614 | TTGGCACCAAAACTCTGCTA | 61 | 2261 |
| 1569945 | N/A | N/A | 94998 | 95017 | CCTCATCAGTTTCCCATGTC | 53 | 2262 |
| 1570214 | N/A | N/A | 48815 | 48834 | TGCTGTTTCTTCCTATTCGA | 18 | 2263 |
| 1570232 | N/A | N/A | 220983 | 221002 | CTGTTCCTACTTGCCTGTTA | 34 | 2264 |
| 1570349 | N/A | N/A | 12569 | 12588 | GACAACTGTCCTTCCTCCAC | 54 | 2265 |
| 1570425 | N/A | N/A | 107911 | 107930 | TCTGGCTCATACTCTTGCAT | 61 | 2266 |
| 1570451 | N/A | N/A | 18503 | 18522 | TCCAATAGAGACCCCTCACT | 121 | 2267 |
| 1570496 | N/A | N/A | 34895 | 34914 | ACACTCCACAATTCCAAGCC | 28 | 2268 |
| 1570632 | N/A | N/A | 126128 | 126147 | TGAGTATCATCTCTGCTCTC | 72 | 2269 |
| 1570688 | N/A | N/A | 60981 | 61000 | AGCCGAGTAATTCATTCTCT | 45 | 2270 |
| 1570725 | N/A | N/A | 37519 | 37538 | CCTAGAGCACTAAGTTTTCA | 62 | 2271 |
| 1570855 | N/A | N/A | 37116 | 37135 | TCCTAACACTCCAGTCAACT | 96 | 2272 |
| 1570912 | N/A | N/A | 168876 | 168895 | GTGCAAATCTCCTCTTACTC | 29 | 2273 |
| 1570916 | N/A | N/A | 46518 | 46537 | CTGGCATTCATTCTTCCAGT | 81 | 2274 |

TABLE 42
Reduction of MSH3 RNA by 5-10-5 MOE modified oligonucleotides with mixed PO/PS internucleoside
linkages in A431 cells

| | SEQ ID | SEQ ID | SEQ ID | SEQ ID | | | |
|---|---|---|---|---|---|---|---|
| | NO: 1 | NO: 1 | NO: 2 | NO: 2 | | MSH3 | SEQ |
| Compound | Start | Stop | Start | Stop | | (% | ID |
| Number | Site | Site | Site | Site | Sequence (5′ to 3′) | UTC) | No. |
| 1480790 | N/A | N/A | 35860 | 35879 | TCCGCTTTTTCCTTTAGGGA | 2 | 1008 |
| 1566498 | N/A | N/A | 143758 | 143777 | GCCTCTCAAAGACATAGTCT | 79 | 2275 |
| 1566538 | N/A | N/A | 41352 | 41371 | TGCATGTATATCTATATAAA | 78 | 2276 |
| | | | 41382 | 41401 | | | |
| | | | 41412 | 41431 | | | |
| 1566661 | N/A | N/A | 19312 | 19331 | GCTACCTCATCACTCTCTAG | 68 | 2277 |
| 1566667 | N/A | N/A | 86566 | 86585 | TGCCTCCTCCCTCATATGAA | 97 | 2278 |
| 1566703 | N/A | N/A | 50599 | 50618 | CCCATCTCTTGCATACAGCT | 44 | 2279 |
| 1566708 | N/A | N/A | 45599 | 45618 | TTGCTCCAACATGTTTCCTT | 35 | 2280 |
| 1566715 | N/A | N/A | 125789 | 125808 | TGTCTGGTCTTTTTTTGCTC | 22 | 2204 |
| 1566731 | N/A | N/A | 39220 | 39239 | TGAATTCTTATTACTTCTGA | 52 | 2281 |
| 1566743 | N/A | N/A | 202126 | 202145 | GTCTGCAGCACCCATCCTAC | 61 | 2282 |
| 1566754 | N/A | N/A | 60979 | 60998 | CCGAGTAATTCATTCTCTCC | 46 | 2283 |
| 1566763 | N/A | N/A | 23142 | 23161 | CTAACATTTGTTCCTCACCT | 47 | 2284 |
| 1566784 | N/A | N/A | 27122 | 27141 | ACCTAAGTTTCAGAATCGGT | 45 | 2285 |
| 1566796 | N/A | N/A | 177599 | 177618 | GTATAAAAAGAAAAACAGAC | 81 | 2286 |
| | | | 205260 | 205279 | | | |
| 1566815 | N/A | N/A | 63023 | 63042 | CCAAAGGCTTTATCTGTTCT | 18 | 2287 |
| 1566818 | N/A | N/A | 220969 | 220988 | CTGTTAGATCCATTTATCAA | 57 | 2288 |
| 1566891 | N/A | N/A | 37262 | 37281 | AGCTCCTCCCACTAGTGCCC | 62 | 2289 |
| 1566965 | N/A | N/A | 34866 | 34885 | CCTTTCCTCACACAGCTTTA | 33 | 2290 |
| 1567024 | N/A | N/A | 48814 | 48833 | GCTGTTTCTTCCTATTCGAC | 11 | 2291 |
| 1567045 | N/A | N/A | 80329 | 80348 | GGTGGATTTTCTCACTCTTT | 32 | 2292 |
| 1567065 | N/A | N/A | 131671 | 131690 | CCTCAAGACTCTAATTTGCT | 65 | 2293 |
| 1567109 | N/A | N/A | 12559 | 12578 | CTTCCTCCACATCAGCAGCC | 65 | 2294 |
| 1567111 | 3179 | 3198 | 212911 | 212930 | TGCTTTCATCCTCACTGACC | 73 | 2295 |
| 1567178 | N/A | N/A | 161174 | 161193 | AGCACATGTAATTTTTGGCA | 47 | 2296 |
| 1567220 | N/A | N/A | 30066 | 30085 | GCTTAGTCCAATATGCAAAT | 13 | 2297 |
| 1567223 | N/A | N/A | 23796 | 23815 | GTTTTATTCTGCTATCTGTA | 16 | 2298 |
| 1567256 | N/A | N/A | 26338 | 26357 | CATGCCAACTTGAACCTGCT | 44 | 2299 |
| 1567268 | N/A | N/A | 21024 | 21043 | ATGCTTGTTTCCAGCCACTA | 24 | 2300 |
| 1567302 | N/A | N/A | 36916 | 36935 | TGACTTCATATGAACCCACA | 16 | 2301 |
| 1567324 | N/A | N/A | 36424 | 36443 | GGTGGTACTATGCCTCCGCA | 64 | 2302 |
| 1567326 | N/A | N/A | 72470 | 72489 | TCCCATGACTGTTATCTCTC | 46 | 2303 |
| 1567379 | N/A | N/A | 20070 | 20089 | GTTCCCTGTATAGAAGCCTA | 42 | 2304 |
| 1567382 | N/A | N/A | 6450 | 6469 | ACATTCCATCTCAACTGTCC | 71 | 2305 |
| 1567417 | N/A | N/A | 40546 | 40565 | ACATGTTTATCTCTCTATAT | 86 | 2306 |
| | | | 40574 | 40593 | | | |
| 1567425 | N/A | N/A | 90496 | 90515 | GTTCAGATGATTCTCCAGTA | 20 | 2307 |
| 1567436 | N/A | N/A | 70286 | 70305 | CCTATGCAGAACACTTTCTT | 110 | 2308 |
| 1567480 | N/A | N/A | 167104 | 167123 | TTCTACTCCATTCTACTGCA | 24 | 2309 |
| 1567518 | N/A | N/A | 82140 | 82159 | TCATCATGTTGCAACATGTA | 58 | 2310 |
| 1567525 | N/A | N/A | 107909 | 107928 | TGGCTCATACTCTTGCATGC | 68 | 2311 |
| 1567541 | N/A | N/A | 53359 | 53378 | AGTCAATTCTTACAAGCAGC | 11 | 2312 |
| 1567559 | N/A | N/A | 76023 | 76042 | GTTCCAGCACACAGACTACT | 67 | 2313 |
| 1567623 | N/A | N/A | 17087 | 17106 | AGTGCAGTCCAGCAAACCTC | 57 | 2314 |
| 1567697 | N/A | N/A | 116760 | 116779 | TCGCTTATTTTTCATAGTGT | 28 | 2315 |
| 1567743 | N/A | N/A | 13704 | 13723 | ATCATGATTTTCCACGGTAA | 47 | 2316 |
| 1567820 | N/A | N/A | 183297 | 183316 | CCCAGACAGTCTCTCAGTCA | 49 | 2317 |
| 1567853 | N/A | N/A | 122594 | 122613 | TGTTGTGATTACATACTACA | 43 | 2318 |
| 1567872 | N/A | N/A | 187806 | 187825 | GCTTTAGTTTCCTCCTACCA | 51 | 2319 |
| 1567877 | N/A | N/A | 94889 | 94908 | AGTGTCCTTGTCCTCTGCCT | 40 | 2320 |
| 1567904 | N/A | N/A | 26043 | 26062 | CAGCAAGGCATTATCTAGGA | 1 | 2321 |
| 1567916 | N/A | N/A | 24997 | 25016 | GCTCAGGATGTCATCAGCCC | 45 | 2322 |
| 1567935 | N/A | N/A | 109797 | 109816 | ATTCAGCTACTCTCGCATGC | 60 | 2323 |
| 1568019 | N/A | N/A | 27700 | 27719 | CTGCCAGACATATATCATAA | 14 | 2324 |
| 1568067 | N/A | N/A | 180699 | 180718 | TACCATTTTAGCATTTCTTA | 10 | 2325 |
| | | | 182447 | 182466 | | | |
| 1568123 | N/A | N/A | 77915 | 77934 | GAGATAGCACCTATCTCCCC | 113 | 2326 |
| 1568138 | N/A | N/A | 12015 | 12034 | GAACACAGTATTTCACCGTT | 45 | 2327 |
| 1568191 | N/A | N/A | 102483 | 102502 | GTATCTCTTCCTCCTTACTA | 63 | 2328 |
| 1568207 | N/A | N/A | 22233 | 22252 | GTCTGGACATATCTTTGGAC | 74 | 2329 |
| 1568307 | N/A | N/A | 149104 | 149123 | GCCATGTCTGCCTCCGATCC | 96 | 2330 |
| 1568340 | N/A | N/A | 14685 | 14704 | TGCCCCCTCTGTCTACTTAC | 71 | 2331 |
| 1568386 | N/A | N/A | 44229 | 44248 | GCTGGCCAATACTGAGGCTT | 86 | 2332 |
| 1568423 | N/A | N/A | 223534 | 223553 | GCCACTATTACCTTTGTGCC | 25 | 2333 |
| 1568945 | N/A | N/A | 18496 | 18515 | GAGACCCCTCACTTTTTCCC | 84 | 2334 |
| 1568986 | N/A | N/A | 35702 | 35721 | CACCCTTTCTTTCTCAATTC | 68 | 2335 |
| 1569021 | N/A | N/A | 168867 | 168886 | TCCTCTTACTCAGCATCACA | 69 | 2336 |
| 1569072 | N/A | N/A | 35923 | 35942 | TCTTGCTCCTATTCCCAACT | 28 | 2337 |
| 1569177 | N/A | N/A | 99612 | 99631 | CAGCAAGCATACCATGTAAC | 76 | 2338 |
| 1569409 | N/A | N/A | 111868 | 111887 | TAAGTCATTCTTGCACTGCA | 26 | 2339 |
| 1569492 | N/A | N/A | 37115 | 37134 | CCTAACACTCCAGTCAACTC | 80 | 2340 |
| 1569551 | N/A | N/A | 164734 | 164753 | TCCTGGTGATTTATTTCCCA | 46 | 2341 |
| 1569583 | N/A | N/A | 118584 | 118603 | ATCTAACTACTCCAAACCTT | 47 | 2342 |
| 1569768 | N/A | N/A | 126050 | 126069 | TCGAGGCTCCAGTCCTGCCA | 58 | 2343 |
| 1569847 | N/A | N/A | 84938 | 84957 | CTCGACATAGAGTAATACTA | 52 | 2344 |
| 1569890 | N/A | N/A | 106457 | 106476 | TGTCCTAGTTTCTCCACCTA | 51 | 2345 |
| 1569893 | N/A | N/A | 29027 | 29046 | CTAGCAAGCAATCAAGAGCT | 36 | 2346 |
| 1570042 | N/A | N/A | 141629 | 141648 | ATGCTTCACTTCCAATATCT | 59 | 2347 |
| 1570118 | N/A | N/A | 139824 | 139843 | TTCCAACCTTCTTCTGTGCA | 52 | 2348 |
| 1570211 | N/A | N/A | 19534 | 19553 | ACCTAGACAGTTTCTCTCCT | 54 | 2349 |
| 1570565 | N/A | N/A | 36166 | 36185 | ACTGTGGTACCACAGGACAT | 111 | 2350 |
| 1570739 | N/A | N/A | 93558 | 93577 | GGCTTGTTCCTGCTAAGGTC | 31 | 2351 |

TABLE 43
Reduction of MSH3 RNA by 5-10-5 MOE modified oligonucleotides with mixed PO/PS internucleoside
linkages in A431 cells

| | SEQ ID | SEQ ID | SEQ ID | SEQ ID | | | |
|---|---|---|---|---|---|---|---|
| | NO: 1 | NO: 1 | NO: 2 | NO: 2 | | MSH3 | SEQ |
| Compound | Start | Stop | Start | Stop | | (% | ID |
| Number | Site | Site | Site | Site | Sequence (5′ to 3′) | UTC) | No. |
| 1480790 | N/A | N/A | 35860 | 35879 | TCCGCTTTTTCCTTTAGGGA | 2 | 1008 |
| 1566448 | N/A | N/A | 26022 | 26041 | TGTTGAAGTATCCACACCCT | 60 | 2352 |
| 1566483 | N/A | N/A | 39217 | 39236 | ATTCTTATTACTTCTGATAA | 126 | 2353 |
| 1566511 | N/A | N/A | 20029 | 20048 | GTTCCAGTGACCTAACTTCA | 49 | 2354 |
| 1566527 | N/A | N/A | 220909 | 220928 | GCTGTGTGCATATAGGATCT | 48 | 2355 |
| 1566548 | N/A | N/A | 23773 | 23792 | TGTCCACACATATGTCTGCC | 8 | 2356 |
| 1566550 | N/A | N/A | 116703 | 116722 | GTTCCAATTGTCACTAAGCA | 15 | 2357 |
| 1566687 | N/A | N/A | 28766 | 28785 | TGCTCCCTAGGATTTGCTTC | 137 | 2358 |
| 1566690 | N/A | N/A | 183281 | 183300 | GTCATCTTTTATCAAAGGTC | 29 | 2359 |
| 1566892 | N/A | N/A | 111867 | 111886 | AAGTCATTCTTGCACTGCAT | 28 | 2360 |
| 1566931 | N/A | N/A | 12537 | 12556 | CTGGAGATTTCTTCCCTGGA | 89 | 2361 |
| 1567030 | N/A | N/A | 37261 | 37280 | GCTCCTCCCACTAGTGCCCA | 62 | 2362 |
| 1567051 | N/A | N/A | 37108 | 37127 | CTCCAGTCAACTCGATGTTC | 81 | 2363 |
| 1567055 | N/A | N/A | 36161 | 36180 | GGTACCACAGGACATTCTTC | 97 | 2364 |
| 1567157 | N/A | N/A | 202124 | 202143 | CTGCAGCACCCATCCTACAA | 110 | 2365 |
| 1567202 | N/A | N/A | 177598 | 177617 | TATAAAAAGAAAAACAGACC | 161 | 2366 |
| | | | 205259 | 205278 | | | |
| 1567241 | N/A | N/A | 36423 | 36442 | GTGGTACTATGCCTCCGCAT | 65 | 2367 |
| 1567253 | N/A | N/A | 79679 | 79698 | TGCCACTCATGAACACCACA | 62 | 2368 |
| 1567322 | N/A | N/A | 45596 | 45615 | CTCCAACATGTTTCCTTAAC | 20 | 2369 |
| 1567361 | N/A | N/A | 180696 | 180715 | CATTTTAGCATTTCTTAGGT | 56 | 2370 |
| | | | 182444 | 182463 | | | |
| 1567370 | N/A | N/A | 41351 | 41370 | GCATGTATATCTATATAAAC | 94 | 2371 |
| | | | 41381 | 41400 | | | |
| | | | 41411 | 41430 | | | |
| 1567407 | N/A | N/A | 89594 | 89613 | GCTGCCTTACTCAGAAGTTT | 78 | 2372 |
| 1567413 | N/A | N/A | 212289 | 212308 | GCTGTTTTGCATAATGTCTT | 68 | 2373 |
| 1567486 | N/A | N/A | 19311 | 19330 | CTACCTCATCACTCTCTAGT | 106 | 2374 |
| 1567508 | N/A | N/A | 102412 | 102431 | GCCACCTTGTCACTGAGACT | 70 | 2375 |
| 1567530 | N/A | N/A | 125853 | 125872 | GCGGTTGCCACTGCTGTTAA | 103 | 2376 |
| 1567537 | N/A | N/A | 76020 | 76039 | CCAGCACACAGACTACTTGC | 86 | 2377 |
| 1567585 | N/A | N/A | 50516 | 50535 | GCACTTGAAATGTCATGGCT | 38 | 2378 |
| 1567646 | N/A | N/A | 12014 | 12033 | AACACAGTATTTCACCGTTT | 17 | 2379 |
| 1567654 | N/A | N/A | 14684 | 14703 | GCCCCCTCTGTCTACTTACT | 100 | 2380 |
| 1567680 | N/A | N/A | 26336 | 26355 | TGCCAACTTGAACCTGCTCC | 81 | 2381 |
| 1567681 | N/A | N/A | 161157 | 161176 | GCAGCAATTTTTCAGTTATA | 42 | 2382 |
| 1567696 | N/A | N/A | 29816 | 29835 | CACCAGTCAATGAATGCTGC | 67 | 2383 |
| 1567700 | N/A | N/A | 168858 | 168877 | TCAGCATCACAAAGGTGCAC | 113 | 2384 |
| 1567702 | N/A | N/A | 13653 | 13672 | CTGTGCTTGTATTAATTCTC | 35 | 2385 |
| 1567729 | N/A | N/A | 5837 | 5856 | GCCTCCTTGCATGACCCCTC | 92 | 2386 |
| 1567753 | N/A | N/A | 93557 | 93576 | GCTTGTTCCTGCTAAGGTCT | 59 | 2387 |
| 1567767 | N/A | N/A | 36874 | 36893 | ATAGAACTGTAACACTGCAA | 20 | 2388 |
| 1567824 | N/A | N/A | 82078 | 82097 | TATGCATATAACACATTTTA | 81 | 2389 |
| 1567847 | N/A | N/A | 223242 | 223261 | GTTCCAATTACTGCTCCACC | 42 | 2390 |
| 1567930 | N/A | N/A | 164733 | 164752 | CCTGGTGATTTATTTCCCAA | 63 | 2391 |
| 1567955 | N/A | N/A | 53358 | 53377 | GTCAATTCTTACAAGCAGCT | 15 | 2392 |
| 1567981 | N/A | N/A | 40545 | 40564 | CATGTTTATCTCTCTATATA | 99 | 2393 |
| | | | 40573 | 40592 | | | |
| 1568064 | N/A | N/A | 22231 | 22250 | CTGGACATATCTTTGGACAT | 45 | 2394 |
| 1568065 | N/A | N/A | 167103 | 167122 | TCTACTCCATTCTACTGCAT | 60 | 2395 |
| 1568068 | N/A | N/A | 99329 | 99348 | GTCTCATGAAACTTTTCATA | 68 | 2396 |
| 1568088 | N/A | N/A | 122592 | 122611 | TTGTGATTACATACTACAGC | 33 | 2397 |
| 1568105 | N/A | N/A | 35917 | 35936 | TCCTATTCCCAACTATTGGC | 58 | 2398 |
| 1568167 | N/A | N/A | 60908 | 60927 | ACCTGGCTTTAATATCTCCA | 30 | 2399 |
| 1568187 | N/A | N/A | 118581 | 118600 | TAACTACTCCAAACCTTGGT | 119 | 2400 |
| 1568231 | N/A | N/A | 70283 | 70302 | ATGCAGAACACTTTCTTGGT | 49 | 2401 |
| 1568237 | N/A | N/A | 27699 | 27718 | TGCCAGACATATATCATAAC | 35 | 2402 |
| 1568256 | N/A | N/A | 63022 | 63041 | CAAAGGCTTTATCTGTTCTA | 30 | 2403 |
| 1568275 | N/A | N/A | 109795 | 109814 | TCAGCTACTCTCGCATGCTA | 71 | 2404 |
| 1568285 | N/A | N/A | 44000 | 44019 | GGTTTCTACCTCCACCTGGC | 112 | 2405 |
| 1568306 | N/A | N/A | 48425 | 48444 | GGCAAACATTTTCCTACAGC | 5 | 2406 |
| 1568360 | N/A | N/A | 17086 | 17105 | GTGCAGTCCAGCAAACCTCC | 99 | 2407 |
| 1568372 | N/A | N/A | 19533 | 19552 | CCTAGACAGTTTCTCTCCTT | 86 | 2408 |
| 1568438 | N/A | N/A | 94843 | 94862 | CTCTCATGAGCCTCTGGCCA | 130 | 2409 |
| 1568958 | N/A | N/A | 187798 | 187817 | TTCCTCCTACCATGACAGCC | 84 | 2410 |
| 1568978 | N/A | N/A | 24987 | 25006 | TCATCAGCCCAAAAGTGGTT | 97 | 2411 |
| 1569066 | N/A | N/A | 72096 | 72115 | GTAGCCTGCACATATCCCTC | 49 | 2412 |
| 1569203 | N/A | N/A | 84835 | 84854 | CGGGCATCCAAGAATCCTCT | 103 | 2413 |
| 1569429 | N/A | N/A | 141581 | 141600 | TCCCCTTCAATACCTTGGCC | 103 | 2414 |
| 1569491 | N/A | N/A | 107848 | 107867 | AGCTTTGTACACACACGGGC | 82 | 2415 |
| 1569780 | N/A | N/A | 77872 | 77891 | GAGCTGATGCACCCTGGATC | 48 | 2416 |
| 1569824 | N/A | N/A | 149092 | 149111 | TCCGATCCATTCTTCTACCA | 81 | 2417 |
| 1569997 | N/A | N/A | 18495 | 18514 | AGACCCCTCACTTTTTCCCA | 124 | 2418 |
| 1570081 | N/A | N/A | 106456 | 106475 | GTCCTAGTTTCTCCACCTAT | 58 | 2419 |
| 1570331 | N/A | N/A | 139822 | 139841 | CCAACCTTCTTCTGTGCATT | 53 | 2420 |
| 1570435 | N/A | N/A | 34862 | 34881 | TCCTCACACAGCTTTAACAT | 79 | 2421 |
| 1570469 | N/A | N/A | 131413 | 131432 | GCTTGTTTGACATCTTGGTC | 47 | 2422 |
| 1570614 | N/A | N/A | 35611 | 35630 | GTGTGCCTCAGACCTCATAT | 33 | 2423 |
| 1570674 | N/A | N/A | 23139 | 23158 | ACATTTGTTCCTCACCTGCA | 79 | 2424 |
| 1570737 | N/A | N/A | 21019 | 21038 | TGTTTCCAGCCACTACTTCC | 75 | 2425 |
| 1570783 | N/A | N/A | 27121 | 27140 | CCTAAGTTTCAGAATCGGTA | 11 | 2426 |
| 1570852 | N/A | N/A | 143159 | 143178 | TGCCACACATCTCTGCCACC | 63 | 2427 |
| 1570928 | N/A | N/A | 86565 | 86584 | GCCTCCTCCCTCATATGAAC | 80 | 2428 |

TABLE 44
Reduction of MSH3 RNA by 5-10-5 MOE modified oligonucleotides with mixed PO/PS internucleoside
linkages in A431 cells

| | SEQ ID | SEQ ID | SEQ ID | SEQ ID | | | |
|---|---|---|---|---|---|---|---|
| | NO: 1 | NO: 1 | NO: 2 | NO: 2 | | MSH3 | SEQ |
| Compound | Start | Stop | Start | Stop | | (% | ID |
| Number | Site | Site | Site | Site | Sequence (5′ to 3′) | UTC) | No. |
| 1480790 | N/A | N/A | 35860 | 35879 | TCCGCTTTTTCCTTTAGGGA | 3 | 1008 |
| 1566446 | N/A | N/A | 29815 | 29834 | ACCAGTCAATGAATGCTGCT | 67 | 2429 |
| 1566460 | N/A | N/A | 27109 | 27128 | AATCGGTATTATATTCCAGT | 17 | 2430 |
| 1566615 | N/A | N/A | 122588 | 122607 | GATTACATACTACAGCTTCT | 30 | 2431 |
| 1566685 | N/A | N/A | 23772 | 23791 | GTCCACACATATGTCTGCCA | 5 | 2432 |
| 1566700 | N/A | N/A | 19275 | 19294 | TCCCAAACTATAGAATCATC | 89 | 2433 |
| 1566715 | N/A | N/A | 125789 | 125808 | TGTCTGGTCTTTTTTTGCTC | 22 | 2204 |
| 1566739 | N/A | N/A | 111861 | 111880 | TTCTTGCACTGCATACCGGC | 66 | 2434 |
| 1566812 | N/A | N/A | 77665 | 77684 | GCTGTGTTAGCAGCTGGCCC | 88 | 2435 |
| 1566860 | N/A | N/A | 26021 | 26040 | GTTGAAGTATCCACACCCTA | 20 | 2436 |
| 1566918 | N/A | N/A | 37257 | 37276 | CTCCCACTAGTGCCCAGCCA | 63 | 2437 |
| 1566920 | N/A | N/A | 93322 | 93341 | GTTCTAGGTCAGAATCTCCA | 32 | 2438 |
| 1566930 | N/A | N/A | 22151 | 22170 | TGGGCTTCAAATAACAGACT | 78 | 2439 |
| 1566954 | N/A | N/A | 19530 | 19549 | AGACAGTTTCTCTCCTTCGC | 39 | 2440 |
| 1567063 | N/A | N/A | 23133 | 23152 | GTTCCTCACCTGCAAAGTAC | 68 | 2441 |
| 1567135 | N/A | N/A | 36422 | 36441 | TGGTACTATGCCTCCGCATA | 23 | 2442 |
| 1567152 | N/A | N/A | 36160 | 36179 | GTACCACAGGACATTCTTCC | 38 | 2443 |
| 1567210 | N/A | N/A | 27698 | 27717 | GCCAGACATATATCATAACC | 43 | 2444 |
| 1567267 | N/A | N/A | 76012 | 76031 | CAGACTACTTGCTATTCCTT | 88 | 2445 |
| 1567273 | N/A | N/A | 53087 | 53106 | GAGCACTATGTTTCATGCAC | 24 | 2446 |
| 1567286 | N/A | N/A | 18494 | 18513 | GACCCCTCACTTTTTCCCAC | 73 | 2447 |
| 1567299 | N/A | N/A | 20027 | 20046 | TCCAGTGACCTAACTTCAGT | 89 | 2448 |
| 1567339 | N/A | N/A | 12429 | 12448 | GCCTCTCCAGAACCCAGGAA | 86 | 2449 |
| 1567357 | N/A | N/A | 106354 | 106373 | GTACCTGCTACATCATGACA | 92 | 2450 |
| 1567368 | N/A | N/A | 41350 | 41369 | CATGTATATCTATATAAACA | 85 | 2451 |
| | | | 41380 | 41399 | | | |
| | | | 41410 | 41429 | | | |
| 1567374 | N/A | N/A | 16099 | 16118 | TGAAGGCTCATCACTTCTCA | 103 | 2452 |
| 1567375 | N/A | N/A | 5530 | 5549 | GCTCAACTGTCTATATGCAA | 42 | 2453 |
| 1567376 | N/A | N/A | 35905 | 35924 | CTATTGGCATTCTCTAAGCT | 68 | 2454 |
| 1567402 | N/A | N/A | 60907 | 60926 | CCTGGCTTTAATATCTCCAT | 56 | 2455 |
| 1567449 | N/A | N/A | 149089 | 149108 | GATCCATTCTTCTACCACCC | 70 | 2456 |
| 1567450 | N/A | N/A | 35607 | 35626 | GCCTCAGACCTCATATCATT | 63 | 2457 |
| 1567474 | N/A | N/A | 168795 | 168814 | TGGAACTTTTGCTCTTTCCT | 117 | 2458 |
| 1567550 | N/A | N/A | 118362 | 118381 | GTCTCCATAATAGTCTTACA | 19 | 2459 |
| 1567567 | N/A | N/A | 107831 | 107850 | GGCTGGCTCTTCCATTCTCA | 87 | 2460 |
| 1567593 | N/A | N/A | 28759 | 28778 | TAGGATTTGCTTCAAAGCCA | 22 | 2461 |
| 1567659 | N/A | N/A | 86559 | 86578 | TCCCTCATATGAACAGGGTA | 120 | 2462 |
| 1567663 | N/A | N/A | 37107 | 37126 | TCCAGTCAACTCGATGTTCC | 63 | 2463 |
| 1567676 | N/A | N/A | 14682 | 14701 | CCCCTCTGTCTACTTACTTC | 111 | 2464 |
| 1567686 | N/A | N/A | 167047 | 167066 | GGTTGCACCCTGATATGCCA | 71 | 2465 |
| 1567698 | N/A | N/A | 187786 | 187805 | TGACAGCCACTGCTTCTGTA | 82 | 2466 |
| 1567740 | N/A | N/A | 219814 | 219833 | CGTGCTTGTGTCATTCCCTC | 85 | 2467 |
| 1567816 | N/A | N/A | 26335 | 26354 | GCCAACTTGAACCTGCTCCC | 60 | 2468 |
| 1567874 | N/A | N/A | 177597 | 177616 | ATAAAAAGAAAAACAGACCA | 103 | 2469 |
| | | | 205258 | 205277 | | | |
| 1567966 | N/A | N/A | 79678 | 79697 | GCCACTCATGAACACCACAT | 42 | 2470 |
| 1567978 | N/A | N/A | 180695 | 180714 | ATTTTAGCATTTCTTAGGTA | 57 | 2471 |
| | | | 182443 | 182462 | | | |
| 1568070 | N/A | N/A | 94827 | 94846 | GCCAGTGGTCTCCTTAAGCT | 62 | 2472 |
| 1568089 | N/A | N/A | 63017 | 63036 | GCTTTATCTGTTCTACTACA | 18 | 2473 |
| 1568127 | N/A | N/A | 48363 | 48382 | TACCAGAATTGATTTGTTCT | 69 | 2474 |
| 1568143 | N/A | N/A | 141580 | 141599 | CCCCTTCAATACCTTGGCCT | 58 | 2475 |
| 1568197 | N/A | N/A | 34791 | 34810 | TGCTGTTTTTACCTTTAGGT | 5 | 2476 |
| 1568242 | N/A | N/A | 212263 | 212282 | TGGACTTTGCTATTTCCTCC | 69 | 2477 |
| 1568262 | N/A | N/A | 131320 | 131339 | GGTCAATGCAGATAACAATC | 19 | 2478 |
| 1568269 | N/A | N/A | 143115 | 143134 | ACTCTGTTACAGTCCCAGCT | 68 | 2479 |
| 1568312 | N/A | N/A | 164657 | 164676 | GCTACTTACTGATCCTTTCA | 65 | 2480 |
| 1568319 | N/A | N/A | 109703 | 109722 | GCTGAAGAACACTGTCAGCT | 134 | 2481 |
| 1568332 | N/A | N/A | 40544 | 40563 | ATGTTTATCTCTCTATATAA | 102 | 2482 |
| | | | 40572 | 40591 | | | |
| 1568342 | N/A | N/A | 45592 | 45611 | AACATGTTTCCTTAACTTCA | 56 | 2483 |
| 1568349 | N/A | N/A | 24967 | 24986 | GCTGAAGTAAAGGACAGCCC | 122 | 2484 |
| 1568401 | N/A | N/A | 82074 | 82093 | CATATAACACATTTTAGGTA | 42 | 2485 |
| 1568430 | N/A | N/A | 161102 | 161121 | TAGACATTGGTTTACCAGCA | 44 | 2486 |
| 1568431 | 1670 | 1689 | 89485 | 89504 | TTGTCATAAATTCCATTTTA | 42 | 2487 |
| 1569040 | N/A | N/A | 116702 | 116721 | TTCCAATTGTCACTAAGCAC | 37 | 2488 |
| 1569041 | N/A | N/A | 102020 | 102039 | TGGCAACAGACTGCTAGGTA | 15 | 2489 |
| 1569117 | N/A | N/A | 201856 | 201875 | TGATCCTGCTTTTTTCTCAC | 59 | 2490 |
| 1569200 | N/A | N/A | 21017 | 21036 | TTTCCAGCCACTACTTCCCT | 65 | 2491 |
| 1569283 | N/A | N/A | 42735 | 42754 | CCAGAATCCCATGCCTGGCA | 99 | 2492 |
| 1569362 | N/A | N/A | 182852 | 182871 | GAGTCACCCCTACATGCCTC | 78 | 2493 |
| 1569403 | N/A | N/A | 70280 | 70299 | CAGAACACTTTCTTGGTCTC | 52 | 2494 |
| 1569449 | N/A | N/A | 99225 | 99244 | ATGTTGTTCTGATAGAAGCT | 51 | 2495 |
| 1569494 | N/A | N/A | 50476 | 50495 | ATGCCATGCGATACCTAGCA | 46 | 2496 |
| 1569540 | N/A | N/A | 223231 | 223250 | TGCTCCACCATCAAGTAGCT | 93 | 2497 |
| 1569798 | N/A | N/A | 72095 | 72114 | TAGCCTGCACATATCCCTCA | 83 | 2498 |
| 1570138 | N/A | N/A | 13626 | 13645 | AATCCCTCCAAGTCAAGGGC | 112 | 2499 |
| 1570249 | N/A | N/A | 39209 | 39228 | TACTTCTGATAATTTGTCAC | 61 | 2500 |
| 1570359 | N/A | N/A | 84834 | 84853 | GGGCATCCAAGAATCCTCTC | 73 | 2501 |
| 1570721 | N/A | N/A | 36872 | 36891 | AGAACTGTAACACTGCAATC | 29 | 2502 |
| 1570740 | N/A | N/A | 12008 | 12027 | GTATTTCACCGTTTAGAGCA | 24 | 2503 |
| 1570851 | N/A | N/A | 139521 | 139540 | TCTCCTGGTTTTCAAGGCAT | 49 | 2504 |

TABLE 45
Reduction of MSH3 RNA by 5-10-5 MOE modified oligonucleotides with mixed PO/PS
internucleoside linkages in A431 cells

| | SEQ ID | SEQ ID | SEQ ID | SEQ ID | | | |
|---|---|---|---|---|---|---|---|
| | NO: 1 | NO: 1 | NO: 2 | NO: 2 | | MSH3 | SEQ |
| Compound | Start | Stop | Start | Stop | | (% | ID |
| Number | Site | Site | Site | Site | Sequence (5′ to 3′) | UTC) | No. |
| 1480790 | N/A | N/A | 35860 | 35879 | TCCGCTTTTTCCTTTAGGGA | 2 | 1008 |
| 1566456 | N/A | N/A | 125788 | 125807 | GTCTGGTCTTTTTTTGCTCC | 9 | 2505 |
| 1566463 | N/A | N/A | 34789 | 34808 | CTGTTTTTACCTTTAGGTAT | 45 | 2506 |
| 1566481 | 1663 | 1682 | 89478 | 89497 | AAATTCCATTTTACTTGATA | 37 | 2507 |
| 1566565 | N/A | N/A | 223182 | 223201 | GCTGGTCTCACTTTCCCCAA | 99 | 2508 |
| 1566569 | N/A | N/A | 168517 | 168536 | CTGCACATCTACTTAGTACT | 76 | 2509 |
| 1566676 | N/A | N/A | 21012 | 21031 | AGCCACTACTTCCCTCTTGA | 37 | 2510 |
| 1566677 | N/A | N/A | 14681 | 14700 | CCCTCTGTCTACTTACTTCT | 51 | 2511 |
| 1566715 | N/A | N/A | 125789 | 125808 | TGTCTGGTCTTTTTTTGCTC | 16 | 2204 |
| 1566727 | N/A | N/A | 36157 | 36176 | CCACAGGACATTCTTCCACA | 15 | 2512 |
| 1566729 | N/A | N/A | 27696 | 27715 | CAGACATATATCATAACCAC | 18 | 2513 |
| 1566761 | N/A | N/A | 40543 | 40562 | TGTTTATCTCTCTATATAAA | 79 | 2514 |
| | | | 40571 | 40590 | | | |
| 1566788 | N/A | N/A | 161069 | 161088 | TAGCATTCACCACAGCATGT | 103 | 2515 |
| 1566791 | N/A | N/A | 180694 | 180713 | TTTTAGCATTTCTTAGGTAC | 50 | 2516 |
| | | | 182442 | 182461 | | | |
| 1566831 | N/A | N/A | 16097 | 16116 | AAGGCTCATCACTTCTCACT | 64 | 2517 |
| 1566833 | N/A | N/A | 18493 | 18512 | ACCCCTCACTTTTTCCCACC | 62 | 2518 |
| 1566900 | N/A | N/A | 26334 | 26353 | CCAACTTGAACCTGCTCCCT | 91 | 2519 |
| 1566912 | N/A | N/A | 143110 | 143129 | GTTACAGTCCCAGCTCGCTA | 46 | 2520 |
| 1566940 | N/A | N/A | 101964 | 101983 | GCAGACATTTGCTAGCCCCC | 64 | 2521 |
| 1567006 | N/A | N/A | 19266 | 19285 | ATAGAATCATCACAAGCATT | 56 | 2522 |
| 1567026 | N/A | N/A | 131272 | 131291 | AAGCAATTTTATCACTATGC | 30 | 2523 |
| 1567031 | N/A | N/A | 50474 | 50493 | GCCATGCGATACCTAGCACT | 60 | 2524 |
| 1567049 | N/A | N/A | 41349 | 41368 | ATGTATATCTATATAAACAT | 94 | 2525 |
| | | | 41379 | 41398 | | | |
| | | | 41409 | 41428 | | | |
| 1567069 | N/A | N/A | 69723 | 69742 | TCAAGCATAGTTTTTCAGTC | 25 | 2526 |
| 1567139 | N/A | N/A | 26924 | 26943 | GTGGCAGGCTGCACTCCCTA | 8† | 2527 |
| 1567148 | N/A | N/A | 19529 | 19548 | GACAGTTTCTCTCCTTCGCC | 63 | 2528 |
| 1567293 | N/A | N/A | 45589 | 45608 | ATGTTTCCTTAACTTCAGTC | 43 | 2529 |
| 1567315 | N/A | N/A | 5522 | 5541 | GTCTATATGCAACACCACCT | 63 | 2530 |
| 1567336 | N/A | N/A | 93262 | 93281 | TCTCAACTCCCTGGTCATGC | 73 | 2531 |
| 1567388 | N/A | N/A | 76010 | 76029 | GACTACTTGCTATTCCTTAA | 76 | 2532 |
| 1567409 | N/A | N/A | 35554 | 35573 | CCATTACCAACTCAAAGCCT | 85 | 2533 |
| 1567416 | N/A | N/A | 39159 | 39178 | TCTGTGAATCATGTCAGCTT | 10 | 2534 |
| 1567515 | N/A | N/A | 122493 | 122512 | CTGCAGTGCAGATATCTCCT | 50 | 2535 |
| 1567521 | N/A | N/A | 212262 | 212281 | GGACTTTGCTATTTCCTCCA | 48 | 2536 |
| 1567522 | N/A | N/A | 107830 | 107849 | GCTGGCTCTTCCATTCTCAG | 72 | 2537 |
| 1567584 | 1934 | 1953 | 109636 | 109655 | GTCCCCTCTCTATGTCGGGC | 58 | 2538 |
| 1567622 | 1204 | 1223 | 23079 | 23098 | TTTGTCCCTAACATTTTCCT | 6 | 2539 |
| 1567682 | N/A | N/A | 182389 | 182408 | GTAGCCATCACTGCTTTCCA | 30 | 2540 |
| 1567710 | N/A | N/A | 36868 | 36887 | CTGTAACACTGCAATCACGA | 7 | 2541 |
| 1567726 | N/A | N/A | 219811 | 219830 | GCTTGTGTCATTCCCTCTCT | 28 | 2542 |
| 1567727 | N/A | N/A | 72093 | 72112 | GCCTGCACATATCCCTCACT | 89 | 2543 |
| 1567733 | N/A | N/A | 11978 | 11997 | GTTGGTGCTATTAAATGTAA | 23 | 2544 |
| 1567744 | N/A | N/A | 139277 | 139296 | ATGGTCATCTTTGCTCCATA | 92 | 2545 |
| 1567765 | N/A | N/A | 201855 | 201874 | GATCCTGCTTTTTTCTCACT | 56 | 2546 |
| 1567774 | N/A | N/A | 111860 | 111879 | TCTTGCACTGCATACCGGCC | 51 | 2547 |
| 1567810 | N/A | N/A | 82073 | 82092 | ATATAACACATTTTAGGTAT | 70 | 2548 |
| 1567843 | N/A | N/A | 141545 | 141564 | TCAGTTGGTATCTCCTCCCT | 56 | 2549 |
| 1567870 | N/A | N/A | 167046 | 167065 | GTTGCACCCTGATATGCCAT | 76 | 2550 |
| 1567884 | N/A | N/A | 177596 | 177615 | TAAAAAGAAAAACAGACCAT | 92 | 2551 |
| | | | 205257 | 205276 | | | |
| 1567896 | N/A | N/A | 13625 | 13644 | ATCCCTCCAAGTCAAGGGCT | 88 | 2552 |
| 1567965 | N/A | N/A | 116701 | 116720 | TCCAATTGTCACTAAGCACT | 39 | 2553 |
| 1568034 | N/A | N/A | 20023 | 20042 | GTGACCTAACTTCAGTATCA | 68 | 2554 |
| 1568103 | N/A | N/A | 62761 | 62780 | GCTCCACAATGTTTTTAGAC | 24 | 2555 |
| 1568137 | N/A | N/A | 47857 | 47876 | CCTAGTTATCATCAATATCA | 48 | 2556 |
| 1568144 | N/A | N/A | 22148 | 22167 | GCTTCAAATAACAGACTCAA | 44 | 2557 |
| 1568304 | N/A | N/A | 149070 | 149089 | CTCCACCATGTTCACTTGGT | 81 | 2558 |
| 1568350 | N/A | N/A | 86489 | 86508 | GCTTCGGATTCTGAAAGCAT | 119 | 2559 |
| 1568357 | N/A | N/A | 29629 | 29648 | TAATAAAATATATACTAAGT | 135 | 2560 |
| | | | 29649 | 29668 | | | |
| 1568407 | N/A | N/A | 94825 | 94844 | CAGTGGTCTCCTTAAGCTCA | 21 | 2561 |
| 1568432 | N/A | N/A | 23755 | 23774 | CCATTGTGTCTATCTTCAAC | 7 | 2562 |
| 1568433 | N/A | N/A | 79636 | 79655 | GTACCAGTTTGATCACTATC | 32 | 2563 |
| 1569443 | N/A | N/A | 186959 | 186978 | GCTAAGGCCTTGAACTTTTC | 94 | 2564 |
| 1569577 | N/A | N/A | 99164 | 99183 | ACATCCTATTGAGACATGCT | 38 | 2565 |
| 1569637 | N/A | N/A | 52904 | 52923 | ATTCTGTGCTCTCACTGTAT | 62 | 2566 |
| 1569725 | N/A | N/A | 12409 | 12428 | GCCAGAGCACTCCTACTCCC | 68 | 2567 |
| 1569810 | N/A | N/A | 60832 | 60851 | CACCACTTTCTTAGAAGACT | 52 | 2568 |
| 1569850 | N/A | N/A | 164519 | 164538 | CTTCAATAGTTTACCATGGC | 16 | 2569 |
| 1570011 | N/A | N/A | 28650 | 28669 | GTTCATGACACTATTCTGTA | 8 | 2570 |
| 1570094 | N/A | N/A | 77656 | 77675 | GCAGCTGGCCCTTTTATCTC | 74 | 2571 |
| 1570109 | N/A | N/A | 24921 | 24940 | GCTGTTTTCATTTTTCCGAG | 5 | 2572 |
| 1570167 | N/A | N/A | 118353 | 118372 | ATAGTCTTACAACAGAGGTA | 16 | 2573 |
| 1570240 | N/A | N/A | 37098 | 37117 | CTCGATGTTCCCAATTCCCT | 26 | 2574 |
| 1570313 | N/A | N/A | 37252 | 37271 | ACTAGTGCCCAGCCAGCATC | 46 | 2575 |
| 1570449 | N/A | N/A | 26020 | 26039 | TTGAAGTATCCACACCCTAT | 74 | 2576 |
| 1570714 | N/A | N/A | 106350 | 106369 | CTGCTACATCATGACAACCA | 82 | 2577 |
| 1570716 | N/A | N/A | 35904 | 35923 | TATTGGCATTCTCTAAGCTC | 46 | 2578 |
| 1570802 | N/A | N/A | 36414 | 36433 | TGCCTCCGCATAAAGAATCA | 73 | 2579 |
| 1570803 | N/A | N/A | 84832 | 84851 | GCATCCAAGAATCCTCTCCA | 62 | 2580 |
| 1570815 | N/A | N/A | 42237 | 42256 | ATAGGATATCTTTTCAGATC | 17 | 2581 |

TABLE 46
Reduction of MSH3 RNA by 5-10-5 MOE modified oligonucleotides with mixed PO/PS internucleoside
linkagesi n A431 cells

| | SEQ ID | SEQ ID | SEQ ID | SEQ ID | | | |
|---|---|---|---|---|---|---|---|
| | NO: 1 | NO: 1 | NO: 2 | NO: 2 | | MSH3 | SEQ |
| Compound | Start | Stop | Start | Stop | | (% | ID |
| Number | Site | Site | Site | Site | Sequence (5′ to 3′) | UTC) | No. |
| 1480790 | N/A | N/A | 35860 | 35879 | TCCGCTTTTTCCTTTAGGGA | 2 | 1008 |
| 1566444 | N/A | N/A | 62632 | 62651 | ATGGACTTGTCACTTATCCT | 37 | 2582 |
| 1566457 | N/A | N/A | 4299 | 4318 | AGGTTCCTTGCCATCCACTC | 92 | 2583 |
| 1566516 | N/A | N/A | 122181 | 122200 | GCTCTGCAAATAAGGTTCTC | 34 | 2584 |
| 1566520 | N/A | N/A | 29628 | 29647 | AATAAAATATATACTAAGTT | 93 | 2585 |
| | | | 29648 | 29667 | | | |
| 1566544 | N/A | N/A | 27695 | 27714 | AGACATATATCATAACCACA | 14 | 2586 |
| 1566547 | N/A | N/A | 22104 | 22123 | ATACCAGGTTCTTACAGCCT | 33 | 2587 |
| 1566576 | N/A | N/A | 52816 | 52835 | AGGAAAGGTATCATGCTCCT | 56 | 2588 |
| 1566591 | N/A | N/A | 69719 | 69738 | GCATAGTTTTTCAGTCTCCC | 7 | 2589 |
| 1566612 | N/A | N/A | 36156 | 36175 | CACAGGACATTCTTCCACAT | 24 | 2590 |
| 1566626 | N/A | N/A | 47762 | 47781 | TGCTTCAATCAATTTACAGT | 22 | 2591 |
| 1566627 | N/A | N/A | 141524 | 141543 | GGGAACATTCCTCAATGCTT | 59 | 2592 |
| 1566654 | N/A | N/A | 13624 | 13643 | TCCCTCCAAGTCAAGGGCTC | 74 | 2593 |
| 1566671 | N/A | N/A | 131271 | 131290 | AGCAATTTTATCACTATGCT | 65 | 2594 |
| 1566713 | N/A | N/A | 167043 | 167062 | GCACCCTGATATGCCATGAT | 39 | 2595 |
| 1566715 | N/A | N/A | 125789 | 125808 | TGTCTGGTCTTTTTTTGCTC | 17 | 2204 |
| 1566720 | N/A | N/A | 24920 | 24939 | CTGTTTTCATTTTTCCGAGT | 7 | 2596 |
| 1566728 | N/A | N/A | 164518 | 164537 | TTCAATAGTTTACCATGGCT | 36 | 2597 |
| 1566730 | N/A | N/A | 84794 | 84813 | GCACTTAAATTTCCCCAGCA | 87 | 2598 |
| 1566787 | N/A | N/A | 60443 | 60462 | ATGAGATCAAATCTTATTAC | 84 | 2599 |
| 1566799 | N/A | N/A | 94819 | 94838 | TCTCCTTAAGCTCAAACACC | 104 | 2600 |
| 1566823 | N/A | N/A | 161042 | 161061 | GCAGAATTGTAACTCTTGCA | 74 | 2601 |
| 1566841 | N/A | N/A | 101881 | 101900 | GCCAATGCAAGGCCTGCCTC | 106 | 2602 |
| 1566872 | N/A | N/A | 21011 | 21030 | GCCACTACTTCCCTCTTGAA | 56 | 2603 |
| 1566921 | N/A | N/A | 82072 | 82091 | TATAACACATTTTAGGTATC | 54 | 2604 |
| 1566962 | N/A | N/A | 40541 | 40560 | TTTATCTCTCTATATAAACA | 120 | 2605 |
| | | | 40569 | 40588 | | | |
| 1567008 | N/A | N/A | 36413 | 36432 | GCCTCCGCATAAAGAATCAT | 75 | 2606 |
| 1567017 | N/A | N/A | 26864 | 26883 | CCCCAGTTATGGCTATAACA | 77 | 2607 |
| 1567076 | N/A | N/A | 11952 | 11971 | TGGGACTGCACACATTTATC | 35 | 2608 |
| 1567087 | N/A | N/A | 75986 | 76005 | GCCAAGCACTCTCCTACTTA | 53 | 2609 |
| 1567112 | N/A | N/A | 77653 | 77672 | GCTGGCCCTTTTATCTCTAA | 69 | 2610 |
| 1567156 | 1900 | 1919 | 109602 | 109621 | ATTTTCTATCTGACCAAACA | 42 | 2611 |
| 1567192 | N/A | N/A | 182388 | 182407 | TAGCCATCACTGCTTTCCAT | 64 | 2612 |
| 1567209 | N/A | N/A | 149068 | 149087 | CCACCATGTTCACTTGGTGC | 107 | 2613 |
| 1567229 | N/A | N/A | 180693 | 180712 | TTTAGCATTTCTTAGGTACA | 36 | 2614 |
| | | | 182441 | 182460 | | | |
| 1567254 | N/A | N/A | 186783 | 186802 | GCCATCACTCTAGTCCTGGC | 94 | 2615 |
| 1567305 | N/A | N/A | 28472 | 28491 | GCCAAAATGTTTAACAGTCA | 2 | 2616 |
| 1567341 | N/A | N/A | 212256 | 212275 | TGCTATTTCCTCCAAACATC | 54 | 2617 |
| 1567392 | N/A | N/A | 72089 | 72108 | GCACATATCCCTCACTAATC | 57 | 2618 |
| 1567418 | N/A | N/A | 111859 | 111878 | CTTGCACTGCATACCGGCCA | 77 | 2619 |
| 1567435 | N/A | N/A | 12358 | 12377 | GGGAAATCTTACTAGCTCAA | 37 | 2620 |
| 1567481 | N/A | N/A | 34788 | 34807 | TGTTTTTACCTTTAGGTATA | 69 | 2621 |
| 1567564 | 1200 | 1219 | 23075 | 23094 | TCCCTAACATTTTCCTTATT | 61 | 2622 |
| 1567588 | N/A | N/A | 118301 | 118320 | AGAATTGGCACTTACACTTA | 46 | 2623 |
| 1567589 | N/A | N/A | 107806 | 107825 | GTGGACTCTGTAATCCATCC | 102 | 2624 |
| 1567603 | N/A | N/A | 45305 | 45324 | GCTCCAGCTGCCAACACCTT | 81 | 2625 |
| 1567616 | N/A | N/A | 23754 | 23773 | CATTGTGTCTATCTTCAACC | 32 | 2626 |
| 1567625 | N/A | N/A | 39110 | 39129 | AACTACTTTTCAGTTGTGCT | 6 | 2627 |
| 1567631 | N/A | N/A | 36860 | 36879 | CTGCAATCACGAAATTGGTA | 42 | 2628 |
| 1567720 | N/A | N/A | 19528 | 19547 | ACAGTTTCTCTCCTTCGCCT | 51 | 2629 |
| 1567745 | N/A | N/A | 26013 | 26032 | ATCCACACCCTATAATTCAG | 22 | 2630 |
| 1567773 | N/A | N/A | 18489 | 18508 | CTCACTTTTTCCCACCAAGT | 75 | 2631 |
| 1567783 | N/A | N/A | 177593 | 177612 | AAAGAAAAACAGACCATAAC | 97 | 2632 |
| | | | 205254 | 205273 | | | |
| 1567796 | N/A | N/A | 16096 | 16115 | AGGCTCATCACTTCTCACTT | 52 | 2633 |
| 1567837 | N/A | N/A | 106348 | 106367 | GCTACATCATGACAACCACT | 49 | 2634 |
| 1567854 | N/A | N/A | 50470 | 50489 | TGCGATACCTAGCACTCCTC | 48 | 2635 |
| 1567857 | N/A | N/A | 201601 | 201620 | CAGCAGCTAATACAGGTTCC | 51 | 2636 |
| 1568006 | N/A | N/A | 93053 | 93072 | CCTCTTTTGGACTCCTTGCT | 81 | 2637 |
| 1568007 | N/A | N/A | 20020 | 20039 | ACCTAACTTCAGTATCAACA | 70 | 2638 |
| 1568016 | N/A | N/A | 14636 | 14655 | AGTTGGTCATTCTATGTATA | 36 | 2639 |
| 1568079 | N/A | N/A | 35902 | 35921 | TTGGCATTCTCTAAGCTCCT | 19 | 2640 |
| 1568091 | N/A | N/A | 168516 | 168535 | TGCACATCTACTTAGTACTA | 59 | 2641 |
| 1568193 | N/A | N/A | 42236 | 42255 | TAGGATATCTTTTCAGATCC | 53 | 2642 |
| 1568195 | N/A | N/A | 143098 | 143117 | GCTCGCTACTACTCTGAGCT | 54 | 2643 |
| 1568308 | N/A | N/A | 41348 | 41367 | TGTATATCTATATAAACATA | 71 | 2644 |
| | | | 41378 | 41397 | | | |
| | | | 41408 | 41427 | | | |
| 1568363 | N/A | N/A | 37097 | 37116 | TCGATGTTCCCAATTCCCTT | 30 | 2645 |
| 1568425 | N/A | N/A | 96117 | 96136 | GCATTATTTTGCTAAATCCC | 47 | 2646 |
| 1568947 | N/A | N/A | 35543 | 35562 | TCAAAGCCTTCTATTCTGCA | 54 | 2647 |
| 1568952 | N/A | N/A | 125770 | 125789 | CCCCAACTCTTGTAATACAC | 59 | 2648 |
| 1569198 | N/A | N/A | 37241 | 37260 | GCCAGCATCCTCAATGAAAC | 31 | 2649 |
| 1569255 | N/A | N/A | 86475 | 86494 | AAGCATCCCCTGTTCTACCA | 46 | 2650 |
| 1569369 | N/A | N/A | 223181 | 223200 | CTGGTCTCACTTTCCCCAAC | 77 | 2651 |
| 1569548 | N/A | N/A | 79634 | 79653 | ACCAGTTTGATCACTATCTT | 32 | 2652 |
| 1569562 | N/A | N/A | 139276 | 139295 | TGGTCATCTTTGCTCCATAA | 55 | 2653 |
| 1569823 | N/A | N/A | 89368 | 89387 | ATGCCAGCTACATTATGGCA | 75 | 2654 |
| 1569990 | N/A | N/A | 116503 | 116522 | GTGCAATATGTTATAACTAC | 11 | 2655 |
| 1570070 | N/A | N/A | 219105 | 219124 | GCAAATCTCAGAATCTGCCT | 72 | 2656 |
| 1570742 | N/A | N/A | 19260 | 19279 | TCATCACAAGCATTCATGAC | 66 | 2657 |
| 1570888 | N/A | N/A | 26330 | 26349 | CTTGAACCTGCTCCCTAACA | 87 | 2658 |

TABLE 47
Reduction of MSH3 RNA by 5-10-5 MOE modified oligonucleotides with mixed PO/PS
internucleoside linkages in A431 cells

| | SEQ ID | SEQ ID | SEQ ID | SEQ ID | | | |
|---|---|---|---|---|---|---|---|
| | NO: 1 | NO: 1 | NO: 2 | NO: 2 | | MSH3 | SEQ |
| Compound | Start | Stop | Start | Stop | | (% | ID |
| Number | Site | Site | Site | Site | Sequence (5′ to 3′) | UTC) | No. |
| 1480790 | N/A | N/A | 35860 | 35879 | TCCGCTTTTTCCTTTAGGGA | 1 | 1008 |
| 1566535 | N/A | N/A | 69370 | 69389 | GCTTGAGAACTCTAGGCCCT | 38 | 2659 |
| 1566558 | N/A | N/A | 52812 | 52831 | AAGGTATCATGCTCCTGGCC | 70 | 2660 |
| 1566563 | N/A | N/A | 106090 | 106109 | TCTGAAGTACTCGCTGTGCT | 92 | 2661 |
| 1566587 | N/A | N/A | 36859 | 36878 | TGCAATCACGAAATTGGTAC | 49 | 2662 |
| 1566633 | N/A | N/A | 109427 | 109446 | AGGCACAAAGGAAACTCCTC | 120 | 2663 |
| 1566653 | N/A | N/A | 149047 | 149066 | AGCCAGACTTGATTTCTGCT | 60 | 2664 |
| 1566689 | N/A | N/A | 39073 | 39092 | TGGGCAGTATCTGATCAGTT | 5 | 2665 |
| 1566715 | N/A | N/A | 125789 | 125808 | TGTCTGGTCTTTTTTTGCTC | 17 | 2204 |
| 1566778 | N/A | N/A | 81949 | 81968 | CCTTGTCTTAAGTAACATCT | 20 | 2666 |
| 1566806 | N/A | N/A | 94812 | 94831 | AAGCTCAAACACCATGCCGT | 101 | 2667 |
| 1566852 | N/A | N/A | 77549 | 77568 | GTCCAGTTAGTATAAAGCAC | 29 | 2668 |
| 1566869 | N/A | N/A | 19259 | 19278 | CATCACAAGCATTCATGACT | 49 | 2669 |
| 1566893 | N/A | N/A | 141523 | 141542 | GGAACATTCCTCAATGCTTC | 40 | 2670 |
| 1567018 | N/A | N/A | 45303 | 45322 | TCCAGCTGCCAACACCTTGT | 23 | 2671 |
| 1567023 | N/A | N/A | 37075 | 37094 | CTCATCCTGTGACCACACTT | 37 | 2672 |
| 1567060 | N/A | N/A | 41347 | 41366 | GTATATCTATATAAACATAT | 68 | 2673 |
| | | | 41377 | 41396 | | | |
| | | | 41407 | 41426 | | | |
| 1567092 | N/A | N/A | 107804 | 107823 | GGACTCTGTAATCCATCCAC | 139 | 2674 |
| 1567110 | N/A | N/A | 11951 | 11970 | GGGACTGCACACATTTATCA | 22 | 2675 |
| 1567138 | N/A | N/A | 122169 | 122188 | AGGTTCTCTGAAATCAGCCA | 31 | 2676 |
| 1567142 | N/A | N/A | 211143 | 211162 | GATGGGTCCTTCCCAGTGCA | 40 | 2677 |
| 1567176 | N/A | N/A | 21006 | 21025 | TACTTCCCTCTTGAATAGCA | 47 | 2678 |
| 1567197 | N/A | N/A | 28446 | 28465 | CTGGGTTACAGAATTCAACT | 2 | 2679 |
| 1567232 | N/A | N/A | 29627 | 29646 | ATAAAATATATACTAAGTTA | 59 | 2680 |
| | | | 29647 | 29666 | | | |
| 1567260 | N/A | N/A | 186782 | 186801 | CCATCACTCTAGTCCTGGCT | 60 | 2681 |
| 1567284 | N/A | N/A | 86411 | 86430 | TCCCTATTATAATGTTGCAC | 63 | 2682 |
| 1567287 | N/A | N/A | 27694 | 27713 | GACATATATCATAACCACAT | 5 | 2683 |
| 1567348 | N/A | N/A | 36410 | 36429 | TCCGCATAAAGAATCATGTT | 33 | 2684 |
| 1567410 | N/A | N/A | 19527 | 19546 | CAGTTTCTCTCCTTCGCCTA | 37 | 2685 |
| 1567454 | N/A | N/A | 26012 | 26031 | TCCACACCCTATAATTCAGC | 81 | 2686 |
| 1567466 | N/A | N/A | 35901 | 35920 | TGGCATTCTCTAAGCTCCTT | 8 | 2687 |
| 1567490 | N/A | N/A | 139201 | 139220 | GTACCTTTATTTCTACATCA | 39 | 2688 |
| 1567504 | N/A | N/A | 217614 | 217633 | GTATCATTATATGCTGGTCT | 91 | 2689 |
| 1567540 | N/A | N/A | 118298 | 118317 | ATTGGCACTTACACTTACTT | 12 | 2690 |
| 1567572 | N/A | N/A | 23751 | 23770 | TGTGTCTATCTTCAACCTTA | 4 | 2691 |
| 1567626 | N/A | N/A | 79478 | 79497 | GCTGGGCTTATGCTGGATGC | 62 | 2692 |
| 1567632 | N/A | N/A | 42230 | 42249 | ATCTTTTCAGATCCTGAGGT | 27 | 2693 |
| 1567668 | N/A | N/A | 18488 | 18507 | TCACTTTTTCCCACCAAGTC | 60 | 2694 |
| 1567674 | N/A | N/A | 200958 | 200977 | TTCAGGTTTTTCACCCAGTA | 43 | 2695 |
| 1567675 | N/A | N/A | 15882 | 15901 | ACCCATCTCTTGCTTGCCAC | 40 | 2696 |
| 1567693 | N/A | N/A | 22099 | 22118 | AGGTTCTTACAGCCTGATCA | 22 | 2697 |
| 1567757 | N/A | N/A | 14432 | 14451 | TCAATCAATATTAGCCTGGC | 67 | 2698 |
| 1567829 | N/A | N/A | 95689 | 95708 | CCTCTGTATATGCAATCCCC | 29 | 2699 |
| 1567861 | N/A | N/A | 60436 | 60455 | CAAATCTTATTACCAGGAAA | 57 | 2700 |
| 1567869 | N/A | N/A | 47073 | 47092 | GGCTACGGTCCCCATCACCA | 63 | 2701 |
| 1567907 | N/A | N/A | 180692 | 180711 | TTAGCATTTCTTAGGTACAC | 46 | 2702 |
| | | | 182440 | 182459 | | | |
| 1567946 | N/A | N/A | 24918 | 24937 | GTTTTCATTTTTCCGAGTCC | 4 | 2703 |
| 1567982 | N/A | N/A | 101853 | 101872 | GCCATAAATGTATATCCTCC | 13 | 2704 |
| 1567986 | N/A | N/A | 111858 | 111877 | TTGCACTGCATACCGGCCAC | 36 | 2705 |
| 1567991 | N/A | N/A | 35522 | 35541 | ATGTACCAGCCTACCCCACC | 90 | 2706 |
| 1568013 | N/A | N/A | 50469 | 50488 | GCGATACCTAGCACTCCTCT | 30 | 2707 |
| 1568054 | N/A | N/A | 71943 | 71962 | GCAACATGGCTCTCTCTACA | 54 | 2708 |
| 1568075 | N/A | N/A | 26770 | 26789 | CCTGTCTGCTTTTCAGGACT | 59 | 2709 |
| 1568096 | N/A | N/A | 62625 | 62644 | TGTCACTTATCCTTGAGGCT | 17 | 2710 |
| 1568145 | N/A | N/A | 166967 | 166986 | ATGCACTGATTTCATACGCA | 15 | 2711 |
| 1568159 | N/A | N/A | 116415 | 116434 | GTACAAGATATCTGACACTC | 18 | 2712 |
| 1568175 | N/A | N/A | 26327 | 26346 | GAACCTGCTCCCTAACATCC | 48 | 2713 |
| 1568212 | N/A | N/A | 36154 | 36173 | CAGGACATTCTTCCACATGT | 18 | 2714 |
| 1568259 | N/A | N/A | 93047 | 93066 | TTGGACTCCTTGCTATTACT | 18 | 2715 |
| 1568276 | N/A | N/A | 89143 | 89162 | GGTCTTTTATCATTAGCCAA | 42 | 2716 |
| 1568286 | N/A | N/A | 84714 | 84733 | CCCATGGTTTCTATGCCGGA | 72 | 2717 |
| 1568324 | N/A | N/A | 40540 | 40559 | TTATCTCTCTATATAAACAT | 56 | 2718 |
| | | | 40568 | 40587 | | | |
| 1568343 | 1197 | 1216 | 23072 | 23091 | CTAACATTTTCCTTATTTTC | 34 | 2719 |
| 1568392 | N/A | N/A | 160975 | 160994 | TTCCAGGTACACACCCCTGC | 114 | 2720 |
| 1569027 | N/A | N/A | 177191 | 177210 | GGTTCAAATTTTGACCCTTC | 20 | 2721 |
| 1569078 | N/A | N/A | 143095 | 143114 | CGCTACTACTCTGAGCTTTC | 77 | 2722 |
| 1569164 | N/A | N/A | 13402 | 13421 | AGTACTTCAGAACCCACTAT | 41 | 2723 |
| 1569598 | N/A | N/A | 182099 | 182118 | TAGCAATGCTGAATACACAC | 30 | 2724 |
| 1569695 | N/A | N/A | 223076 | 223095 | GCTGCTGCAAATGACTGCTC | 49 | 2725 |
| 1569842 | N/A | N/A | 168140 | 168159 | TGGCTCCATTTTAAGCCCTC | 122 | 2726 |
| 1569999 | N/A | N/A | 20009 | 20028 | GTATCAACATCTGTATCTAT | 41 | 2727 |
| 1570116 | N/A | N/A | 12356 | 12375 | GAAATCTTACTAGCTCAAGC | 39 | 2728 |
| 1570356 | N/A | N/A | 37237 | 37256 | GCATCCTCAATGAAACAGCT | 24 | 2729 |
| 1570398 | N/A | N/A | 125761 | 125780 | TTGTAATACACTGTTGCACT | 15 | 2730 |
| 1570411 | N/A | N/A | 4298 | 4317 | GGTTCCTTGCCATCCACTCT | 80 | 2731 |
| 1570599 | N/A | N/A | 34780 | 34799 | CCTTTAGGTATATAGCATAA | 21 | 2732 |
| 1570618 | N/A | N/A | 75909 | 75928 | ATGGCTCTTTTCCTTAACTC | 40 | 2733 |
| 1570772 | N/A | N/A | 164501 | 164520 | GCTCTTAGGATAAACTCCTA | 50 | 2734 |
| 1570822 | N/A | N/A | 131225 | 131244 | GGCACTATGATTTAACCTCT | 8 | 2735 |

TABLE 48
Reduction of MSH3 RNA by 5-10-5 MOE modified oligonucleotides with mixed PO/PS
internucleoside linkages in A431 cells

| | SEQ ID | SEQ ID | SEQ ID | SEQ ID | | | |
|---|---|---|---|---|---|---|---|
| | NO: 1 | NO: 1 | NO: 2 | NO: 2 | | MSH3 | SEQ |
| Compound | Start | Stop | Start | Stop | | (% | ID |
| Number | Site | Site | Site | Site | Sequence (5′ to 3′) | UTC) | No. |
| 1480790 | N/A | N/A | 35860 | 35879 | TCCGCTTTTTCCTTTAGGGA | 2 | 1008 |
| 1566491 | N/A | N/A | 36846 | 36865 | TTGGTACCATCAAGTACCGA | 63 | 2736 |
| 1566568 | N/A | N/A | 95649 | 95668 | GTGGTACATGACTAATTATA | 32 | 2737 |
| 1566609 | N/A | N/A | 105933 | 105952 | TTCCATCTTCAACTCCTGTA | 48 | 2738 |
| 1566624 | N/A | N/A | 200956 | 200975 | CAGGTTTTTCACCCAGTAGC | 55 | 2739 |
| 1566642 | N/A | N/A | 26673 | 26692 | GCCTGGAGTTAATATACCTA | 66 | 2740 |
| 1566656 | N/A | N/A | 37234 | 37253 | TCCTCAATGAAACAGCTCCA | 56 | 2741 |
| 1566672 | N/A | N/A | 40539 | 40558 | TATCTCTCTATATAAACATA | 101 | 2742 |
| | | | 40567 | 40586 | | | |
| 1566688 | N/A | N/A | 89054 | 89073 | GTCCTCCTTATTCTTTAGCA | 45 | 2743 |
| 1566715 | N/A | N/A | 125789 | 125808 | TGTCTGGTCTTTTTTTGCTC | 15 | 2204 |
| 1566718 | N/A | N/A | 41345 | 41364 | ATATCTATATAAACATATAC | 112 | 2744 |
| | | | 41375 | 41394 | | | |
| | | | 41405 | 41424 | | | |
| 1566747 | N/A | N/A | 13395 | 13414 | CAGAACCCACTATTCTAGGT | 30 | 2745 |
| 1566753 | N/A | N/A | 22025 | 22044 | GTTCCCTATTTATAGTATTC | 22 | 2746 |
| 1566798 | N/A | N/A | 19496 | 19515 | CTACATATTTGTTCCTGCCC | 66 | 2747 |
| 1566814 | 1148 | 1167 | 23023 | 23042 | TATCAGTCATTATCTCATCA | 5 | 2748 |
| 1566844 | N/A | N/A | 36130 | 36149 | TTCAAATGATATCAATGAGC | 29 | 2749 |
| 1566864 | N/A | N/A | 81823 | 81842 | AGTTGTCTGCATCCCAGCCA | 52 | 2750 |
| 1566915 | N/A | N/A | 27692 | 27711 | CATATATCATAACCACATCT | 35 | 2751 |
| 1566923 | N/A | N/A | 23750 | 23769 | GTGTCTATCTTCAACCTTAA | 19 | 2752 |
| 1566979 | N/A | N/A | 24908 | 24927 | TTCCGAGTCCCAGTTCGCAC | 23 | 2753 |
| 1567042 | N/A | N/A | 168138 | 168157 | GCTCCATTTTAAGCCCTCAT | 21 | 2754 |
| 1567074 | N/A | N/A | 186781 | 186800 | CATCACTCTAGTCCTGGCTT | 63 | 2755 |
| 1567101 | N/A | N/A | 15881 | 15900 | CCCATCTCTTGCTTGCCACA | 63 | 2756 |
| 1567102 | N/A | N/A | 86396 | 86415 | TGCACATGCCTCAAGTGAAC | 27 | 2757 |
| 1567127 | N/A | N/A | 4297 | 4316 | GTTCCTTGCCATCCACTCTT | 49 | 2758 |
| 1567128 | N/A | N/A | 26326 | 26345 | AACCTGCTCCCTAACATCCT | 78 | 2759 |
| 1567355 | N/A | N/A | 37073 | 37092 | CATCCTGTGACCACACTTCC | 48 | 2760 |
| 1567439 | N/A | N/A | 71641 | 71660 | GGTACTTTATCATAACCATA | 19 | 2761 |
| 1567441 | N/A | N/A | 211142 | 211161 | ATGGGTCCTTCCCAGTGCAT | 45 | 2762 |
| 1567456 | N/A | N/A | 118291 | 118310 | CTTACACTTACTTTCTCCAC | 30 | 2763 |
| 1567463 | N/A | N/A | 35891 | 35910 | TAAGCTCCTTGATCTGATTC | 53 | 2764 |
| 1567501 | N/A | N/A | 52791 | 52810 | CAGGTATGTTACCTTACACA | 62 | 2765 |
| 1567524 | N/A | N/A | 84699 | 84718 | CCGGACTGGTCCCATAGGCA | 31 | 2766 |
| 1567533 | N/A | N/A | 26011 | 26030 | CCACACCCTATAATTCAGCA | 11 | 2767 |
| 1567701 | N/A | N/A | 29626 | 29645 | TAAAATATATACTAAGTTAA | 61 | 2768 |
| | | | 29646 | 29665 | | | |
| 1567712 | N/A | N/A | 148774 | 148793 | TGTGTCTTCTAGTTCATCCC | 29 | 2769 |
| 1567770 | N/A | N/A | 182070 | 182089 | ACTGGCTCATGAACCAGTCA | 94 | 2770 |
| 1567781 | N/A | N/A | 62501 | 62520 | CCTATCTCTATTTTCCTGGA | 25 | 2771 |
| 1567812 | N/A | N/A | 176666 | 176685 | GTCTTACACCTGTCCCACCA | 42 | 2772 |
| 1567825 | N/A | N/A | 38833 | 38852 | TCTGGTAACTTCTACTGTAT | 28 | 2773 |
| 1567890 | N/A | N/A | 36409 | 36428 | CCGCATAAAGAATCATGTTA | 7 | 2774 |
| 1567895 | N/A | N/A | 28445 | 28464 | TGGGTTACAGAATTCAACTT | 43 | 2775 |
| 1567994 | N/A | N/A | 94810 | 94829 | GCTCAAACACCATGCCGTCA | 38 | 2776 |
| 1568050 | N/A | N/A | 68813 | 68832 | AAGCTATTTTGAACCCATGC | 16 | 2777 |
| 1568092 | N/A | N/A | 138860 | 138879 | TCACCATGAATATGCAGGGC | 20 | 2778 |
| 1568093 | N/A | N/A | 180669 | 180688 | TCAGTGGTATTAACATCCAC | 67 | 2779 |
| | | | 182417 | 182436 | | | |
| 1568136 | N/A | N/A | 79360 | 79379 | AGCCAGTTTCCTGACCATCC | 37 | 2780 |
| 1568227 | N/A | N/A | 75520 | 75539 | CCCTCCGACATATAAGCTGC | 118 | 2781 |
| 1568273 | N/A | N/A | 164466 | 164485 | GCTTCACCTAGAATCTTGCT | 70 | 2782 |
| 1568309 | N/A | N/A | 166966 | 166985 | TGCACTGATTTCATACGCAC | 68 | 2783 |
| 1568371 | N/A | N/A | 122141 | 122160 | GTGAAGTTCTATCACACCAT | 50 | 2784 |
| 1568376 | N/A | N/A | 125686 | 125705 | CCTGATGTTCTAACTCATCT | 101 | 2785 |
| 1568398 | N/A | N/A | 116361 | 116380 | TGCCTGTGTTTTACCTTTCC | 37 | 2786 |
| 1568415 | N/A | N/A | 47069 | 47088 | ACGGTCCCCATCACCAGCCA | 86 | 2787 |
| 1568416 | N/A | N/A | 111713 | 111732 | GCCCCATGAACTGATGCTGC | 50 | 2788 |
| 1568419 | N/A | N/A | 19257 | 19276 | TCACAAGCATTCATGACTTC | 49 | 2789 |
| 1568440 | N/A | N/A | 19999 | 20018 | CTGTATCTATAAAAGACTCA | 83 | 2790 |
| 1569102 | N/A | N/A | 11950 | 11969 | GGACTGCACACATTTATCAC | 23 | 2791 |
| 1569126 | N/A | N/A | 60188 | 60207 | TGGTCCTCTTCCCTGGACTA | 59 | 2792 |
| 1569282 | N/A | N/A | 34491 | 34510 | GTGAAACCCCGTATCCTGTC | 62 | 2793 |
| 1569502 | N/A | N/A | 21005 | 21024 | ACTTCCCTCTTGAATAGCAC | 28 | 2794 |
| 1569620 | N/A | N/A | 143081 | 143100 | GCTTTCTCTGATCTACATTC | 28 | 2795 |
| 1569631 | N/A | N/A | 45302 | 45321 | CCAGCTGCCAACACCTTGTA | 23 | 2796 |
| 1569645 | N/A | N/A | 160973 | 160992 | CCAGGTACACACCCCTGCTA | 121 | 2797 |
| 1569687 | N/A | N/A | 14431 | 14450 | CAATCAATATTAGCCTGGCT | 52 | 2798 |
| 1569783 | N/A | N/A | 12281 | 12300 | CAGAAACACCATCACTTTGC | 50 | 2799 |
| 1569906 | N/A | N/A | 35521 | 35540 | TGTACCAGCCTACCCCACCT | 57 | 2800 |
| 1569913 | N/A | N/A | 107798 | 107817 | TGTAATCCATCCACCACTCT | 70 | 2801 |
| 1569933 | N/A | N/A | 141458 | 141477 | CTGGTCTCCTCTATCATGCC | 50 | 2802 |
| 1570053 | N/A | N/A | 217346 | 217365 | ACTACTTACAAGCTATGGCC | 58 | 2803 |
| 1570136 | N/A | N/A | 101820 | 101839 | TTCCACTGCTGAATATCAGT | 42 | 2804 |
| 1570174 | N/A | N/A | 18487 | 18506 | CACTTTTTCCCACCAAGTCT | 56 | 2805 |
| 1570279 | N/A | N/A | 109408 | 109427 | CCTTCATACTGAGATAGTCA | 34 | 2806 |
| 1570334 | N/A | N/A | 42186 | 42205 | CTGAAATTTTCTGTATGGTC | 7 | 2807 |
| 1570501 | N/A | N/A | 131175 | 131194 | GCAGATGAAGACACTTTGGT | 17 | 2808 |
| 1570503 | N/A | N/A | 50465 | 50484 | TACCTAGCACTCCTCTGCTC | 59 | 2809 |
| 1570514 | N/A | N/A | 77068 | 77087 | TTGCACCCTAGTATTCTATC | 58 | 2810 |
| 1570575 | N/A | N/A | 222982 | 223001 | GCAGTTTGATTTCTTTGATC | 14 | 2811 |
| 1570593 | N/A | N/A | 93044 | 93063 | GACTCCTTGCTATTACTGCT | 16 | 2812 |

TABLE 49
Reduction of MSH3 RNA by 5-10-5 MOE modified oligonucleotides with mixed
PO/PS internucleoside linkages in A431 cells

| | SEQ ID | SEQ ID | SEQ ID | SEQ ID | | | |
|---|---|---|---|---|---|---|---|
| Compound | No: 1 | No: 1 | No: 2 | No: 2 | | MSH3 | SEQ |
| Number | Start Site | Stop Site | Start Site | Stop Site | Sequence (5′ to 3′) | (% UTC) | ID No. |
| 1480790 | N/A | N/A | 35860 | 35879 | TCCGCTTTTTCCTTTAGGGA | 3 | 1008 |
| 1566502 | N/A | N/A | 71331 | 71350 | GTTTTTGGATTCTCCATGCT | 19 | 2813 |
| 1566577 | N/A | N/A | 101816 | 101835 | ACTGCTGAATATCAGTTCTC | 89 | 2814 |
| 1566607 | N/A | N/A | 36296 | 36315 | AGTAGAGGTTATTCTTATTC | 4 | 2815 |
| 1566649 | N/A | N/A | 164461 | 164480 | ACCTAGAATCTTGCTCTCCT | 40 | 2816 |
| 1566675 | 1147 | 1166 | 23022 | 23041 | ATCAGTCATTATCTCATCAA | 4 | 2817 |
| 1566715 | N/A | N/A | 125789 | 125808 | TGTCTGGTCTTTTTTTGCTC | 27 | 2204 |
| 1566803 | N/A | N/A | 210830 | 210849 | GCAGAGGTTTCACTTTTCCC | 30 | 2818 |
| 1566856 | N/A | N/A | 143051 | 143070 | CCTACATCTCAATTCTTTCA | 80 | 2819 |
| 1566876 | N/A | N/A | 182069 | 182088 | CTGGCTCATGAACCAGTCAT | 122 | 2820 |
| 1566907 | N/A | N/A | 111699 | 111718 | TGCTGCCATCTTGATGCCAT | 75 | 2821 |
| 1566928 | N/A | N/A | 29620 | 29639 | ATATACTAAGTTAATAAAAT | 125 | 2822 |
| | | | 29640 | 29659 | | | |
| 1566958 | N/A | N/A | 12275 | 12294 | CACCATCACTTTGCCCATGA | 36 | 2823 |
| 1566959 | N/A | N/A | 61689 | 61708 | TGGTAGTCTATGATTCACCT | 95 | 2824 |
| 1567011 | N/A | N/A | 68812 | 68831 | AGCTATTTTGAACCCATGCC | 46 | 2825 |
| 1567039 | N/A | N/A | 116360 | 116379 | GCCTGTGTTTTACCTTTCCA | 26 | 2826 |
| 1567122 | N/A | N/A | 81822 | 81841 | GTTGTCTGCATCCCAGCCAA | 55 | 2827 |
| 1567161 | N/A | N/A | 21004 | 21023 | CTTCCCTCTTGAATAGCACA | 35 | 2828 |
| 1567344 | N/A | N/A | 88257 | 88276 | TCACACTCTCCTTATTGTCT | 43 | 2829 |
| 1567391 | N/A | N/A | 180668 | 180687 | CAGTGGTATTAACATCCACA | 83 | 2830 |
| | | | 182416 | 182435 | | | |
| 1567415 | N/A | N/A | 41051 | 41070 | GCATGTATATTTATCTATAT | 26 | 2831 |
| | | | 41085 | 41104 | | | |
| | | | 41117 | 41136 | | | |
| | | | 41151 | 41170 | | | |
| | | | 41185 | 41204 | | | |
| | | | 41219 | 41238 | | | |
| | | | 41253 | 41272 | | | |
| | | | 41287 | 41306 | | | |
| | | | 41321 | 41340 | | | |
| | | | 41445 | 41464 | | | |
| 1567437 | N/A | N/A | 122136 | 122155 | GTTCTATCACACCATTCATT | 18 | 2832 |
| 1567453 | N/A | N/A | 45292 | 45311 | ACACCTTGTATAACTCAGGC | 7 | 2833 |
| 1567485 | N/A | N/A | 19254 | 19273 | CAAGCATTCATGACTTCCAA | 65 | 2834 |
| 1567496 | N/A | N/A | 4285 | 4304 | CCACTCTTCAAAGAATCCTC | 59 | 2835 |
| 1567516 | N/A | N/A | 130771 | 130790 | ATGATATCATAGTCACACCA | 28 | 2836 |
| 1567528 | N/A | N/A | 36111 | 36130 | CTAAGGCTAGTTTTTAACCA | 24 | 2837 |
| 1567547 | N/A | N/A | 138701 | 138720 | AGCAGACTCCAACTGTGGCA | 70 | 2838 |
| 1567556 | N/A | N/A | 37072 | 37091 | ATCCTGTGACCACACTTCCT | 34 | 2839 |
| 1567576 | N/A | N/A | 105932 | 105951 | TCCATCTTCAACTCCTGTAC | 77 | 2840 |
| 1567637 | N/A | N/A | 22023 | 22042 | TCCCTATTTATAGTATTCAT | 45 | 2841 |
| 1567652 | N/A | N/A | 222761 | 222780 | TTGCTCTTGCTTTATAGGCT | 31 | 2842 |
| 1567669 | N/A | N/A | 166918 | 166937 | GGGATCTTATCTCTTTCTCA | 44 | 2843 |
| 1567683 | N/A | N/A | 60012 | 60031 | GCTTTTCACTTACGAGCCAA | 48 | 2844 |
| 1567737 | N/A | N/A | 26324 | 26343 | CCTGCTCCCTAACATCCTAA | 52 | 2845 |
| 1567758 | N/A | N/A | 148660 | 148679 | CCACCATGTTTACATTTCAA | 22 | 2846 |
| 1567808 | N/A | N/A | 24907 | 24926 | TCCGAGTCCCAGTTCGCACA | 21 | 2847 |
| 1567811 | N/A | N/A | 42119 | 42138 | GCATCAGTTGAATAATCCCT | 11 | 2848 |
| 1567906 | N/A | N/A | 13391 | 13410 | ACCCACTATTCTAGGTAACT | 38 | 2849 |
| 1567908 | N/A | N/A | 26672 | 26691 | CCTGGAGTTAATATACCTAA | 50 | 2850 |
| 1567940 | N/A | N/A | 52790 | 52809 | AGGTATGTTACCTTACACAA | 46 | 2851 |
| 1567989 | N/A | N/A | 37172 | 37191 | CACTGAACAGCTCTTCTGCA | 73 | 2852 |
| 1568045 | N/A | N/A | 118235 | 118254 | GCCACTTTTCTACTACATAT | 37 | 2853 |
| 1568047 | N/A | N/A | 160944 | 160963 | GTCCAACTACAGCCCTTGGC | 100 | 2854 |
| 1568121 | N/A | N/A | 50462 | 50481 | CTAGCACTCCTCTGCTCCCA | 64 | 2855 |
| 1568139 | N/A | N/A | 35520 | 35539 | GTACCAGCCTACCCCACCTC | 50 | 2856 |
| 1568161 | N/A | N/A | 35888 | 35907 | GCTCCTTGATCTGATTCTTT | 16 | 2857 |
| 1568198 | N/A | N/A | 95628 | 95647 | AGCTGAGCCACTGACTAATC | 46 | 2858 |
| 1568205 | N/A | N/A | 93008 | 93027 | GCACCTCTCCATGAACTTGC | 78 | 2859 |
| 1568223 | N/A | N/A | 186712 | 186731 | TGGTTGTAGCTTCCTTGTCT | 45 | 2860 |
| 1568238 | N/A | N/A | 40537 | 40556 | TCTCTCTATATAAACATATA | 90 | 2861 |
| | | | 40565 | 40584 | | | |
| 1568251 | N/A | N/A | 34484 | 34503 | CCCGTATCCTGTCTCTACTA | 86 | 2862 |
| 1568260 | N/A | N/A | 125569 | 125588 | TGGTGTCACTGATTTATGCC | 47 | 2863 |
| 1568283 | N/A | N/A | 36844 | 36863 | GGTACCATCAAGTACCGACC | 84 | 2864 |
| 1568289 | N/A | N/A | 47068 | 47087 | CGGTCCCCATCACCAGCCAT | 77 | 2865 |
| 1568326 | N/A | N/A | 107790 | 107809 | ATCCACCACTCTCCACCTCT | 73 | 2866 |
| 1568346 | N/A | N/A | 19972 | 19991 | ATGACAGGTCTTCTACATCC | 30 | 2867 |
| 1568348 | N/A | N/A | 25958 | 25977 | CAGGCATTTGTATACGATAC | 10 | 2868 |
| 1568395 | N/A | N/A | 79359 | 79378 | GCCAGTTTCCTGACCATCCT | 65 | 2869 |
| 1568412 | N/A | N/A | 23740 | 23759 | TCAACCTTAAAATCTCAGGG | 11 | 2870 |
| 1568421 | N/A | N/A | 11949 | 11968 | GACTGCACACATTTATCACC | 29 | 2871 |
| 1568993 | N/A | N/A | 168137 | 168156 | CTCCATTTTAAGCCCTCATC | 42 | 2872 |
| 1568995 | N/A | N/A | 109031 | 109050 | ATCTGGTCCTTCCATGCCTC | 69 | 2873 |
| 1569172 | N/A | N/A | 84694 | 84713 | CTGGTCCCATAGGCACCATC | 109 | 2874 |
| 1569333 | N/A | N/A | 86388 | 86407 | CCTCAAGTGAACCACTGAAA | 88 | 2875 |
| 1569442 | N/A | N/A | 38804 | 38823 | ATGTTAGTCACAACCTACCG | 28 | 2876 |
| 1569446 | N/A | N/A | 94508 | 94527 | TTGTACTACTTCTGCCTGCA | 37 | 2877 |
| 1569457 | N/A | N/A | 14226 | 14245 | AATGGTTGTCAATCACAGCT | 46 | 2878 |
| 1569512 | N/A | N/A | 76996 | 77015 | TGTTCATAATATAAGCTCCC | 38 | 2879 |
| 1569653 | N/A | N/A | 18468 | 18487 | TGGTTCCCACCAAGTTTCTT | 61 | 2880 |
| 1569696 | N/A | N/A | 27686 | 27705 | TCATAACCACATCTTCTTCC | 23 | 2881 |
| 1569805 | N/A | N/A | 28444 | 28463 | GGGTTACAGAATTCAACTTA | 12 | 2882 |
| 1569820 | N/A | N/A | 217329 | 217348 | GCCATTTCTTAAATGGACAT | 76 | 2883 |
| 1569821 | N/A | N/A | 141457 | 141476 | TGGTCTCCTCTATCATGCCA | 64 | 2884 |
| 1570265 | N/A | N/A | 15282 | 15301 | ATTCTATATTAAATGCAGGT | 19 | 2885 |
| 1570393 | N/A | N/A | 200950 | 200969 | TTTCACCCAGTAGCCAGCTT | 72 | 2886 |
| 1570573 | N/A | N/A | 176654 | 176673 | TCCCACCATTTATTTTGGAA | 93 | 2887 |
| 1570779 | N/A | N/A | 19495 | 19514 | TACATATTTGTTCCTGCCCT | 65 | 2888 |
| 1570808 | N/A | N/A | 75459 | 75478 | TCCTTATATACGACTACACT | 66 | 2889 |

TABLE 50
Reduction of MSH3 RNA by 5-10-5 MOE modified oligonucleotides with
mixed PO/PS internucleoside linkages in A431 cells

| | SEQ ID | SEQ ID | SEQ ID | SEQ ID | | | |
|---|---|---|---|---|---|---|---|
| Compound | No: 1 | No: 1 | No: 2 | No: 2 | | MSH3 | SEQ |
| Number | Start Site | Stop Site | Start Site | Stop Site | Sequence (5′ to 3′) | (% UTC) | ID No. |
| 1480790 | N/A | N/A | 35860 | 35879 | TCCGCTTTTTCCTTTAGGGA | 2 | 1008 |
| 1566510 | N/A | N/A | 25916 | 25935 | GCAGCATTCTCTGTACAACT | 20 | 2890 |
| 1566525 | N/A | N/A | 19968 | 19987 | CAGGTCTTCTACATCCTTAG | 37 | 2891 |
| 1566598 | N/A | N/A | 68811 | 68830 | GCTATTTTGAACCCATGCCT | 69 | 2892 |
| 1566620 | N/A | N/A | 23739 | 23758 | CAACCTTAAAATCTCAGGGC | 39 | 2893 |
| 1566640 | N/A | N/A | 200925 | 200944 | ATGCTGGTAACTACTTTCTC | 112 | 2894 |
| 1566651 | N/A | N/A | 36843 | 36862 | GTACCATCAAGTACCGACCA | 33 | 2895 |
| 1566699 | N/A | N/A | 47027 | 47046 | GGAAACTCTTTATCCAGGCC | 9 | 2896 |
| 1566707 | N/A | N/A | 142948 | 142967 | TGGCTGTTTGTTATTCCCCT | 53 | 2897 |
| 1566715 | N/A | N/A | 125789 | 125808 | TGTCTGGTCTTTTTTTGCTC | 20 | 2204 |
| 1566736 | N/A | N/A | 84684 | 84703 | AGGCACCATCTCCCTACCAT | 79 | 2898 |
| 1566749 | N/A | N/A | 36108 | 36127 | AGGCTAGTTTTTAACCAAGT | 7 | 2899 |
| 1566774 | N/A | N/A | 45291 | 45310 | CACCTTGTATAACTCAGGCA | 42 | 2900 |
| 1566867 | N/A | N/A | 35873 | 35892 | TCTTTTCTCTGTATCCGCTT | 5 | 2901 |
| 1566934 | N/A | N/A | 176230 | 176249 | GGTTTTCTCTAGTAAGCCCC | 59 | 2902 |
| 1567010 | N/A | N/A | 24899 | 24918 | CCAGTTCGCACACATGGTTA | 69 | 2903 |
| 1567022 | N/A | N/A | 79308 | 79327 | GCTTCAGTTTATCAAGAGGT | 33 | 2904 |
| 1567044 | N/A | N/A | 41050 | 41069 | CATGTATATTTATCTATATA | 52 | 2905 |
| | | | 41084 | 41103 | | | |
| | | | 41116 | 41135 | | | |
| | | | 41150 | 41169 | | | |
| | | | 41184 | 41203 | | | |
| | | | 41218 | 41237 | | | |
| | | | 41252 | 41271 | | | |
| | | | 41286 | 41305 | | | |
| | | | 41320 | 41339 | | | |
| | | | 41444 | 41463 | | | |
| 1567047 | N/A | N/A | 61686 | 61705 | TAGTCTATGATTCACCTGCT | 24 | 2906 |
| 1567098 | N/A | N/A | 180667 | 180686 | AGTGGTATTAACATCCACAA | 104 | 2907 |
| | | | 182415 | 182434 | | | |
| 1567108 | N/A | N/A | 148486 | 148505 | GGCAGCACACATCAAGGGTT | 53 | 2908 |
| 1567134 | N/A | N/A | 50407 | 50426 | TGGTCATGCTCCCATATGGC | 44 | 2909 |
| 1567155 | N/A | N/A | 26322 | 26341 | TGCTCCCTAACATCCTAAGC | 71 | 2910 |
| 1567252 | N/A | N/A | 107765 | 107784 | CACTACTATAGTCTAAGTCC | 54 | 2911 |
| 1567274 | N/A | N/A | 138700 | 138719 | GCAGACTCCAACTGTGGCAT | 99 | 2912 |
| 1567307 | N/A | N/A | 42080 | 42099 | GCCATCTCTGCCATATGAAC | 21 | 2913 |
| 1567346 | N/A | N/A | 86208 | 86227 | GAAGGCTTACAGCCTTCATC | 102 | 2914 |
| 1567428 | N/A | N/A | 35509 | 35528 | CCCCACCTCCTTCATACAGC | 81 | 2915 |
| 1567430 | N/A | N/A | 166917 | 166936 | GGATCTTATCTCTTTCTCAA | 27 | 2916 |
| 1567460 | N/A | N/A | 125528 | 125547 | TATCATCTAGACTTCTAGGC | 45 | 2917 |
| 1567470 | N/A | N/A | 116282 | 116301 | AGGTAGCAAGTATTCCAGCT | 33 | 2918 |
| 1567510 | N/A | N/A | 222760 | 222779 | TGCTCTTGCTTTATAGGCTA | 50 | 2919 |
| 1567535 | 1146 | 1165 | 23021 | 23040 | TCAGTCATTATCTCATCAAC | 2 | 2920 |
| 1567566 | N/A | N/A | 21000 | 21019 | CCTCTTGAATAGCACACCTA | 79 | 2921 |
| 1567628 | N/A | N/A | 37053 | 37072 | TGGAATGCCCTCTTTCTACC | 61 | 2922 |
| 1567649 | N/A | N/A | 105826 | 105845 | GTAGTAACAAGACCTTCCAA | 57 | 2923 |
| 1567650 | N/A | N/A | 14225 | 14244 | ATGGTTGTCAATCACAGCTA | 82 | 2924 |
| 1567689 | N/A | N/A | 71295 | 71314 | TGTCTATCTCTGTATCACGA | 24 | 2925 |
| 1567717 | N/A | N/A | 58625 | 58644 | GGTCAAGGCTCACCTCCTCT | 87 | 2926 |
| 1567741 | N/A | N/A | 27676 | 27695 | ATCTTCTTCCTCTGTACGCA | 2 | 2927 |
| 1567789 | N/A | N/A | 13378 | 13397 | GGTAACTGGATACTCATCTA | 69 | 2928 |
| 1567792 | N/A | N/A | 95627 | 95646 | GCTGAGCCACTGACTAATCA | 48 | 2929 |
| 1567817 | N/A | N/A | 75450 | 75469 | ACGACTACACTGTTTGACTT | 82 | 2930 |
| 1567828 | N/A | N/A | 38803 | 38822 | TGTTAGTCACAACCTACCGA | 33 | 2931 |
| 1568042 | N/A | N/A | 160943 | 160962 | TCCAACTACAGCCCTTGGCA | 87 | 2932 |
| 1568046 | N/A | N/A | 15268 | 15287 | GCAGGTATATACTATGTAGT | 25 | 2933 |
| 1568052 | N/A | N/A | 18464 | 18483 | TCCCACCAAGTTTCTTGTGT | 66 | 2934 |
| 1568141 | N/A | N/A | 4269 | 4288 | CCTCTACTTTTAGCTCTGGA | 55 | 2935 |
| 1568157 | N/A | N/A | 182067 | 182086 | GGCTCATGAACCAGTCATCA | 88 | 2936 |
| 1568254 | N/A | N/A | 88092 | 88111 | ATCCTTTATCAGCCAGTCCT | 41 | 2937 |
| 1568270 | N/A | N/A | 111686 | 111705 | ATGCCATGGACACTTTGACT | 47 | 2938 |
| 1568296 | N/A | N/A | 118146 | 118165 | AGGCCAGTTTTCACTTTGCA | 29 | 2939 |
| 1568311 | N/A | N/A | 19466 | 19485 | TGGTGACATTATCTCAGAGC | 19 | 2940 |
| 1568315 | N/A | N/A | 29618 | 29637 | ATACTAAGTTAATAAAATAT | 103 | 2941 |
| | | | 29638 | 29657 | | | |
| 1568318 | N/A | N/A | 217051 | 217070 | TGTCCATTGTTTTACCTATC | 23 | 2942 |
| 1568329 | N/A | N/A | 76369 | 76388 | ATGACTTCCAATTATCTGCA | 91 | 2943 |
| 1568393 | N/A | N/A | 92991 | 93010 | TGCTAACTTGATCCCACCAC | 68 | 2944 |
| 1568441 | N/A | N/A | 40535 | 40554 | TCTCTATATAAACATATACA | 106 | 2945 |
| | | | 40563 | 40582 | | | |
| 1568444 | N/A | N/A | 141456 | 141475 | GGTCTCCTCTATCATGCCAT | 93 | 2946 |
| 1568962 | N/A | N/A | 168125 | 168144 | CCCTCATCCTTATTTATTCA | 68 | 2947 |
| 1569123 | N/A | N/A | 36295 | 36314 | GTAGAGGTTATTCTTATTCC | 3 | 2948 |
| 1569162 | N/A | N/A | 164439 | 164458 | AGGACCACCCTTCACTCATT | 33 | 2949 |
| 1569400 | N/A | N/A | 28283 | 28302 | ACTTCACTTAATCAATCAGT | 13 | 2950 |
| 1569414 | N/A | N/A | 130768 | 130787 | ATATCATAGTCACACCATCT | 38 | 2951 |
| 1569500 | N/A | N/A | 26671 | 26690 | CTGGAGTTAATATACCTAAC | 33 | 2952 |
| 1569874 | N/A | N/A | 94285 | 94304 | GTTCCAAATACTAGCTGCCC | 39 | 2953 |
| 1570107 | N/A | N/A | 52765 | 52784 | GGGTTTGTAAACCAAACTTC | 99 | 2954 |
| 1570150 | N/A | N/A | 19252 | 19271 | AGCATTCATGACTTCCAACA | 50 | 2955 |
| 1570182 | N/A | N/A | 12274 | 12293 | ACCATCACTTTGCCCATGAT | 59 | 2956 |
| 1570318 | N/A | N/A | 34065 | 34084 | TCGAGATTAGATCATATGTT | 8 | 2957 |
| 1570421 | N/A | N/A | 109016 | 109035 | GCCTCTTATTATTATCTGAA | 57 | 2958 |
| 1570458 | N/A | N/A | 11724 | 11743 | ACAGGCTTTCATTAGATCTC | 68 | 2959 |
| 1570520 | N/A | N/A | 101603 | 101622 | AGCTTCCCTAACCAATGCAT | 120 | 2960 |
| 1570579 | N/A | N/A | 37171 | 37190 | ACTGAACAGCTCTTCTGCAC | 51 | 2961 |
| 1570645 | N/A | N/A | 210828 | 210847 | AGAGGTTTCACTTTTCCCCA | 68 | 2962 |
| 1570686 | N/A | N/A | 121413 | 121432 | GTTTCAAATCTGCCACACCC | 36 | 2963 |
| 1570788 | N/A | N/A | 186618 | 186637 | TGCTCACAATGATATAGCAA | 90 | 2964 |
| 1570841 | N/A | N/A | 81821 | 81840 | TTGTCTGCATCCCAGCCAAC | 67 | 2965 |
| 1570900 | N/A | N/A | 21962 | 21981 | GCAGATCTGTAATAAACCAT | 40 | 2966 |

TABLE 51
Reduction of MSH3 RNA by 5-10-5 MOE modified oligonucleotides
with mixed PO/PS internucleoside linkages in A431 cells

| | SEQ ID | SEQ ID | SEQ ID | SEQ ID | | | |
|---|---|---|---|---|---|---|---|
| Compound | No: 1 | No: 1 | No: 2 | No: 2 | | MSH3 | SEQ |
| Number | Start Site | Stop Site | Start Site | Stop Site | Sequence (5′ to 3′) | (% UTC) | ID No. |
| 1480790 | N/A | N/A | 35860 | 35879 | TCCGCTTTTTCCTTTAGGGA | 1 | 1008 |
| 1566452 | N/A | N/A | 130580 | 130599 | ATCATGCTCAGTCATCCCTC | 44 | 2967 |
| 1566484 | N/A | N/A | 121078 | 121097 | GTGGACATTTTGAACAAGGA | 6 | 2968 |
| 1566534 | N/A | N/A | 27675 | 27694 | TCTTCTTCCTCTGTACGCAC | 5 | 2969 |
| 1566552 | N/A | N/A | 58618 | 58637 | GCTCACCTCCTCTAAGATGC | 37 | 2970 |
| 1566634 | N/A | N/A | 32689 | 32708 | TCAACATAATAGTCCTAACT | 123 | 2971 |
| 1566637 | N/A | N/A | 118145 | 118164 | GGCCAGTTTTCACTTTGCAA | 48 | 2972 |
| 1566695 | N/A | N/A | 164435 | 164454 | CCACCCTTCACTCATTGTCT | 87 | 2973 |
| 1566701 | N/A | N/A | 26590 | 26609 | ACCAAACCAGCCTACTTCTC | 29 | 2974 |
| 1566715 | N/A | N/A | 125789 | 125808 | TGTCTGGTCTTTTTTTGCTC | 14 | 2204 |
| 1566719 | N/A | N/A | 160872 | 160891 | TGGCAATAGCTCCCTGGTCA | 140 | 2975 |
| 1566757 | N/A | N/A | 94284 | 94303 | TTCCAAATACTAGCTGCCCT | 49 | 2976 |
| 1566825 | N/A | N/A | 116115 | 116134 | GGTCTGGTACTTACTTGGCA | 104 | 2977 |
| 1566827 | N/A | N/A | 19967 | 19986 | AGGTCTTCTACATCCTTAGA | 25 | 2978 |
| 1566916 | N/A | N/A | 13371 | 13390 | GGATACTCATCTATAGCAGT | 40 | 2979 |
| 1566951 | N/A | N/A | 36840 | 36859 | CCATCAAGTACCGACCACTT | 40 | 2980 |
| 1566955 | N/A | N/A | 86207 | 86226 | AAGGCTTACAGCCTTCATCT | 70 | 2981 |
| 1566976 | N/A | N/A | 108991 | 109010 | GAGCAGGTATCATACAAGGA | 57 | 2982 |
| 1567040 | N/A | N/A | 35868 | 35887 | TCTCTGTATCCGCTTTTTCC | 12 | 2983 |
| 1567086 | N/A | N/A | 40855 | 40874 | ATCTAAACATATACATGTGC | 30 | 2984 |
| | | | 40885 | 40904 | | | |
| | | | 40915 | 40934 | | | |
| | | | 40945 | 40964 | | | |
| | | | 40975 | 40994 | | | |
| | | | 41005 | 41024 | | | |
| 1567143 | N/A | N/A | 38798 | 38817 | GTCACAACCTACCGAACTGA | 19 | 2985 |
| 1567149 | N/A | N/A | 29617 | 29636 | TACTAAGTTAATAAAATATA | 61 | 2986 |
| | | | 29637 | 29656 | | | |
| 1567198 | N/A | N/A | 12273 | 12292 | CCATCACTTTGCCCATGATA | 38 | 2987 |
| 1567281 | N/A | N/A | 168085 | 168104 | CTGCAAGCTGTCTCATTCCT | 26 | 2988 |
| 1567471 | N/A | N/A | 24894 | 24913 | TCGCACACATGGTTAACTCT | 24 | 2989 |
| 1567482 | N/A | N/A | 81819 | 81838 | GTCTGCATCCCAGCCAACAC | 45 | 2990 |
| 1567534 | N/A | N/A | 76363 | 76382 | TCCAATTATCTGCACTGATA | 68 | 2991 |
| 1567558 | N/A | N/A | 92936 | 92955 | GCTCTGATGATATCAGCCCC | 61 | 2992 |
| 1567563 | N/A | N/A | 111684 | 111703 | GCCATGGACACTTTGACTTT | 37 | 2993 |
| 1567608 | N/A | N/A | 84682 | 84701 | GCACCATCTCCCTACCATGT | 53 | 2994 |
| 1567613 | N/A | N/A | 26321 | 26340 | GCTCCCTAACATCCTAAGCC | 83 | 2995 |
| 1567620 | N/A | N/A | 21895 | 21914 | CTCCATTCTTCCATTATCAG | 38 | 2996 |
| 1567665 | N/A | N/A | 105135 | 105154 | GCCTGCAACAAATATCTCAT | 48 | 2997 |
| 1567678 | N/A | N/A | 87805 | 87824 | GACTCCTTTGACTAAGGCCC | 43 | 2998 |
| 1567711 | N/A | N/A | 19251 | 19270 | GCATTCATGACTTCCAACAA | 33 | 2999 |
| 1567725 | N/A | N/A | 27916 | 27935 | ATGGGCTTCTCTGCCTAGTC | 75 | 3000 |
| 1567801 | N/A | N/A | 125402 | 125421 | TGCATATTTCATTCATTAGC | 13 | 3001 |
| 1567806 | N/A | N/A | 45290 | 45309 | ACCTTGTATAACTCAGGCAC | 77 | 3002 |
| 1567830 | N/A | N/A | 42076 | 42095 | TCTCTGCCATATGAACTTCC | 35 | 3003 |
| 1567838 | N/A | N/A | 79222 | 79241 | TGGTATTATTCTTATTTCGA | 5 | 3004 |
| 1567850 | N/A | N/A | 20992 | 21011 | ATAGCACACCTAATCAAGGG | 47 | 3005 |
| 1567922 | N/A | N/A | 36294 | 36313 | TAGAGGTTATTCTTATTCCC | 3 | 3006 |
| 1567934 | N/A | N/A | 52622 | 52641 | CCACCTTATTTGCCTCACAT | 18 | 3007 |
| 1567944 | N/A | N/A | 141453 | 141472 | CTCCTCTATCATGCCATGCA | 64 | 3008 |
| 1567957 | N/A | N/A | 68739 | 68758 | ACCCAACTCAAATCCTGTCC | 44 | 3009 |
| 1567993 | N/A | N/A | 50402 | 50421 | ATGCTCCCATATGGCCATCA | 67 | 3010 |
| 1568171 | N/A | N/A | 36107 | 36126 | GGCTAGTTTTTAACCAAGTA | 14 | 3011 |
| 1568202 | N/A | N/A | 4268 | 4287 | CTCTACTTTTAGCTCTGGAA | 40 | 3012 |
| 1568247 | N/A | N/A | 23725 | 23744 | CAGGGCACATGGACCAAGAC | 89 | 3013 |
| 1568263 | N/A | N/A | 40534 | 40553 | CTCTATATAAACATATACAT | 60 | 3014 |
| | | | 40562 | 40581 | | | |
| 1568299 | 1140 | 1159 | 23015 | 23034 | ATTATCTCATCAACATTTAC | 34 | 3015 |
| 1568328 | N/A | N/A | 217050 | 217069 | GTCCATTGTTTTACCTATCA | 11 | 3016 |
| 1568334 | N/A | N/A | 182066 | 182085 | GCTCATGAACCAGTCATCAA | 60 | 3017 |
| 1568355 | N/A | N/A | 222759 | 222778 | GCTCTTGCTTTATAGGCTAT | 18 | 3018 |
| 1568358 | N/A | N/A | 18403 | 18422 | GGTGATTGATCAAATCAGCT | 77 | 3019 |
| 1568394 | N/A | N/A | 200924 | 200943 | TGCTGGTAACTACTTTCTCA | 55 | 3020 |
| 1568402 | N/A | N/A | 11722 | 11741 | AGGCTTTCATTAGATCTCCT | 109 | 3021 |
| 1568404 | N/A | N/A | 75122 | 75141 | ACAGAGTTTTGGCCTTCCCT | 38 | 3022 |
| 1568949 | N/A | N/A | 47026 | 47045 | GAAACTCTTTATCCAGGCCC | 86 | 3023 |
| 1568974 | N/A | N/A | 61684 | 61703 | GTCTATGATTCACCTGCTTT | 33 | 3024 |
| 1568988 | N/A | N/A | 37170 | 37189 | CTGAACAGCTCTTCTGCACT | 64 | 3025 |
| 1569133 | N/A | N/A | 15003 | 15022 | TTGTACATATTAATACCTGG | 21 | 3026 |
| 1569270 | N/A | N/A | 180643 | 180662 | GTGTAGCCATCACTACTTTC | 52 | 3027 |
| 1569390 | N/A | N/A | 14224 | 14243 | TGGTTGTCAATCACAGCTAC | 64 | 3028 |
| 1569453 | N/A | N/A | 19465 | 19484 | GGTGACATTATCTCAGAGCC | 46 | 3029 |
| 1569623 | N/A | N/A | 186297 | 186316 | GCCAGAGTCTACACTCTGCT | 78 | 3030 |
| 1569772 | N/A | N/A | 25695 | 25714 | CTGGAACTAGAAGCTCCAAC | 116 | 3031 |
| 1569830 | N/A | N/A | 101413 | 101432 | AAGACTCTACCTACTCACCA | 94 | 3032 |
| 1569880 | N/A | N/A | 210191 | 210210 | GGACCACCTATCTCCATGGT | 78 | 3033 |
| 1570122 | N/A | N/A | 142928 | 142947 | GCAGCTCTCTCATTTGGGCG | 74 | 3034 |
| 1570175 | N/A | N/A | 148090 | 148109 | CTGTCTGAATAGCATCAATC | 88 | 3035 |
| 1570230 | N/A | N/A | 35499 | 35518 | TTCATACAGCCTTCCTTGGC | 69 | 3036 |
| 1570300 | N/A | N/A | 107581 | 107600 | TCCAGAATCTTTAATTGTCC | 36 | 3037 |
| 1570431 | N/A | N/A | 175852 | 175871 | CTCCTTCATCATACCTACTA | 111 | 3038 |
| 1570464 | N/A | N/A | 166623 | 166642 | ATTGCACTGTTTATCTCACT | 17 | 3039 |
| 1570525 | N/A | N/A | 95624 | 95643 | GAGCCACTGACTAATCAGCA | 24 | 3040 |
| 1570663 | N/A | N/A | 37049 | 37068 | ATGCCCTCTTTCTACCCAGT | 27 | 3041 |
| 1570770 | N/A | N/A | 138684 | 138703 | GCATCTGCACTCTTCTTTTA | 48 | 3042 |
| 1570859 | N/A | N/A | 71286 | 71305 | CTGTATCACGACCACAGTCT | 53 | 3043 |

TABLE 52
Reduction of MSH3 RNA by 5-10-5 MOE modified oligonucleotides
with mixed PO/PS internucleoside linkages in A431 cells

| | SEQ ID | SEQ ID | SEQ ID | SEQ ID | | | |
|---|---|---|---|---|---|---|---|
| Compound | No: 1 | No: 1 | No: 2 | No: 2 | | MSH3 | SEQ |
| Number | Start Site | Stop Site | Start Site | Stop Site | Sequence (5′ to 3′) | (% UTC) | ID No. |
| 1480790 | N/A | N/A | 35860 | 35879 | TCCGCTTTTTCCTTTAGGGA | 1 | 1008 |
| 1566458 | N/A | N/A | 35867 | 35886 | CTCTGTATCCGCTTTTTCCT | 6 | 3044 |
| 1566469 | N/A | N/A | 175575 | 175594 | GTGCTCACTTATCATGTGGA | 24 | 3045 |
| 1566504 | N/A | N/A | 18402 | 18421 | GTGATTGATCAAATCAGCTT | 34 | 3046 |
| 1566506 | N/A | N/A | 15001 | 15020 | GTACATATTAATACCTGGGT | 77 | 3047 |
| 1566508 | N/A | N/A | 26319 | 26338 | TCCCTAACATCCTAAGCCAA | 112 | 3048 |
| 1566605 | N/A | N/A | 52556 | 52575 | GCACCATAATCACTCCAGAG | 35 | 3049 |
| 1566630 | N/A | N/A | 37169 | 37188 | TGAACAGCTCTTCTGCACTA | 84 | 3050 |
| 1566715 | N/A | N/A | 125789 | 125808 | TGTCTGGTCTTTTTTTGCTC | 17 | 2204 |
| 1566813 | N/A | N/A | 21893 | 21912 | CCATTCTTCCATTATCAGAG | 6 | 3051 |
| 1566837 | N/A | N/A | 115039 | 115058 | GCATCAGTATAGAACTCCAT | 7 | 3052 |
| 1566889 | N/A | N/A | 19965 | 19984 | GTCTTCTACATCCTTAGAGC | 25 | 3053 |
| 1566953 | N/A | N/A | 75060 | 75079 | CTGCAGCAAGAAATACAGGC | 54 | 3054 |
| 1566989 | N/A | N/A | 13370 | 13389 | GATACTCATCTATAGCAGTT | 106 | 3055 |
| 1566999 | N/A | N/A | 50380 | 50399 | GAGGCATGCAAGCCCACTCA | 72 | 3056 |
| 1567050 | N/A | N/A | 40065 | 40084 | TACATGTTTATCTATCTATC | 76 | 3057 |
| | | | 40093 | 40112 | | | |
| | | | 40121 | 40140 | | | |
| | | | 40149 | 40168 | | | |
| | | | 40249 | 40268 | | | |
| | | | 40276 | 40295 | | | |
| | | | 40327 | 40346 | | | |
| 1567120 | N/A | N/A | 92921 | 92940 | GCCCCATGCTCAGAATCACT | 65 | 3058 |
| 1567151 | N/A | N/A | 45289 | 45308 | CCTTGTATAACTCAGGCACC | 35 | 3059 |
| 1567167 | N/A | N/A | 61479 | 61498 | TGGCAACCTCCCTTCTGTCC | 82 | 3060 |
| 1567184 | N/A | N/A | 160175 | 160194 | GCCACACATTTCCAGTCTCC | 34 | 3061 |
| 1567206 | N/A | N/A | 125239 | 125258 | TGCCTGTGCCTTCAACATCT | 30 | 3062 |
| 1567214 | N/A | N/A | 95622 | 95641 | GCCACTGACTAATCAGCAGA | 35 | 3063 |
| 1567217 | N/A | N/A | 42073 | 42092 | CTGCCATATGAACTTCCTAT | 25 | 3064 |
| 1567282 | N/A | N/A | 87288 | 87307 | GTTCACATGAATTCATGGTC | 7 | 3065 |
| 1567320 | N/A | N/A | 36801 | 36820 | GAAGCACTTCCTCTTAACCA | 4 | 3066 |
| 1567351 | N/A | N/A | 111680 | 111699 | TGGACACTTTGACTTTGTGC | 30 | 3067 |
| 1567360 | N/A | N/A | 4149 | 4168 | CCAAGGCTGCTACCGGTCTT | 69 | 3068 |
| 1567395 | N/A | N/A | 166622 | 166641 | TTGCACTGTTTATCTCACTT | 12 | 3069 |
| 1567434 | N/A | N/A | 27915 | 27934 | TGGGCTTCTCTGCCTAGTCC | 97 | 3070 |
| 1567443 | N/A | N/A | 209583 | 209602 | ATTCCCCTTATGCTTCAGGC | 32 | 3071 |
| 1567476 | N/A | N/A | 68738 | 68757 | CCCAACTCAAATCCTGTCCA | 49 | 3072 |
| 1567500 | N/A | N/A | 12263 | 12282 | GCCCATGATATGCTTTCTGC | 48 | 3073 |
| 1567531 | N/A | N/A | 58267 | 58286 | AGTCTGTATCAACTTCCAGT | 45 | 3074 |
| 1567598 | N/A | N/A | 23721 | 23740 | GCACATGGACCAAGACCATC | 42 | 3075 |
| 1567618 | N/A | N/A | 26586 | 26605 | AACCAGCCTACTTCTCTCAT | 21 | 3076 |
| 1567642 | N/A | N/A | 37048 | 37067 | TGCCCTCTTTCTACCCAGTC | 96 | 3077 |
| 1567648 | N/A | N/A | 40854 | 40873 | TCTAAACATATACATGTGCA | 68 | 3078 |
| | | | 40884 | 40903 | | | |
| | | | 40914 | 40933 | | | |
| | | | 40944 | 40963 | | | |
| | | | 40974 | 40993 | | | |
| | | | 41004 | 41023 | | | |
| 1567662 | N/A | N/A | 29375 | 29394 | AAGCTCTTGATCACCATTTC | 36 | 3079 |
| 1567721 | N/A | N/A | 71284 | 71303 | GTATCACGACCACAGTCTCT | 58 | 3080 |
| 1567730 | N/A | N/A | 27674 | 27693 | CTTCTTCCTCTGTACGCACA | 17 | 3081 |
| 1567762 | N/A | N/A | 200923 | 200942 | GCTGGTAACTACTTTCTCAG | 68 | 3082 |
| 1567793 | N/A | N/A | 118131 | 118150 | TTGCAAGGTCATGACTGCAT | 60 | 3083 |
| 1567901 | N/A | N/A | 222213 | 222232 | AGCAACTGTTTCTTTAGCTA | 20 | 3084 |
| 1567902 | N/A | N/A | 141452 | 141471 | TCCTCTATCATGCCATGCAC | 44 | 3085 |
| 1567915 | N/A | N/A | 147868 | 147887 | TAGTTCTTACAACAATGTCA | 27 | 3086 |
| 1567929 | N/A | N/A | 31112 | 31131 | TTGCGAGCACCCAGGTGTCT | 37 | 3087 |
| 1567975 | N/A | N/A | 47000 | 47019 | ATGCCGCTTTCTCACTCCAC | 25 | 3088 |
| 1567983 | N/A | N/A | 20991 | 21010 | TAGCACACCTAATCAAGGGT | 98 | 3089 |
| 1567999 | N/A | N/A | 24888 | 24907 | ACATGGTTAACTCTGGCGGT | 43 | 3090 |
| 1568009 | N/A | N/A | 81790 | 81809 | TCCTAGTTATAGCCATCCTA | 24 | 3091 |
| 1568024 | N/A | N/A | 36293 | 36312 | AGAGGTTATTCTTATTCCCC | 4 | 3092 |
| 1568044 | N/A | N/A | 108845 | 108864 | AGCCACCTCTAGCCCTGGCC | 52 | 3093 |
| 1568078 | N/A | N/A | 120993 | 121012 | GCACAATCACTACAGCGGGC | 12 | 3094 |
| 1568087 | N/A | N/A | 104826 | 104845 | GCTTCACCTTTCACATACAC | 37 | 3095 |
| 1568232 | N/A | N/A | 142909 | 142928 | GCTGACCTTTCTGCCACATC | 42 | 3096 |
| 1568282 | N/A | N/A | 138591 | 138610 | CCCTCACTTCTGCATCATCA | 46 | 3097 |
| 1568291 | N/A | N/A | 76354 | 76373 | CTGCACTGATATGGAAGGCC | 83 | 3098 |
| 1568295 | N/A | N/A | 186214 | 186233 | GCTCTATAGTGACCCCAACC | 43 | 3099 |
| 1568403 | N/A | N/A | 19464 | 19483 | GTGACATTATCTCAGAGCCT | 24 | 3100 |
| 1568948 | N/A | N/A | 94146 | 94165 | TGGCTGAGTTTCTCATAGTA | 40 | 3101 |
| 1569003 | N/A | N/A | 84664 | 84683 | GTACCAAAATTCCAGCTCCA | 17 | 3102 |
| 1569069 | N/A | N/A | 11648 | 11667 | CACCTTGTTTACTATTACTC | 31 | 3103 |
| 1569173 | N/A | N/A | 164434 | 164453 | CACCCTTCACTCATTGTCTA | 49 | 3104 |
| 1569183 | N/A | N/A | 38792 | 38811 | ACCTACCGAACTGATTTCAT | 111 | 3105 |
| 1569272 | N/A | N/A | 182063 | 182082 | CATGAACCAGTCATCAAGGC | 48 | 3106 |
| 1569313 | N/A | N/A | 19245 | 19264 | ATGACTTCCAACAAAGGTGT | 47 | 3107 |
| 1569461 | N/A | N/A | 86204 | 86223 | GCTTACAGCCTTCATCTACA | 68 | 3108 |
| 1569464 | N/A | N/A | 25694 | 25713 | TGGAACTAGAAGCTCCAACT | 79 | 3109 |
| 1569723 | N/A | N/A | 14220 | 14239 | TGTCAATCACAGCTACAGAT | 28 | 3110 |
| 1569877 | N/A | N/A | 178853 | 178872 | GTAGCAATCTTTCAATTTCC | 34 | 3111 |
| 1569888 | N/A | N/A | 35497 | 35516 | CATACAGCCTTCCTTGGCTA | 65 | 3112 |
| 1570378 | N/A | N/A | 22870 | 22889 | AATGGTTCACAGCCAGGCGC | 61 | 3113 |
| 1570546 | N/A | N/A | 130577 | 130596 | ATGCTCAGTCATCCCTCAGT | 29 | 3114 |
| 1570625 | N/A | N/A | 107546 | 107565 | GCCTGTTTAGCTCTTGGGTC | 80 | 3115 |
| 1570697 | N/A | N/A | 167967 | 167986 | TGTAAAGATTTGCTTCTCCA | 12 | 3116 |
| 1570709 | N/A | N/A | 36031 | 36050 | ATTAGCTCACATCATTGGTT | 17 | 3117 |
| 1570754 | N/A | N/A | 217049 | 217068 | TCCATTGTTTTACCTATCAC | 13 | 3118 |
| 1570820 | N/A | N/A | 101390 | 101409 | ATCCTCCTAAAGTCTCCCTA | 62 | 3119 |
| 1570893 | N/A | N/A | 78655 | 78674 | AGGTATCTTGTCACCCCTTT | 32 | 3120 |

TABLE 53
Reduction of MSH3 RNA by 5-10-5 MOE modified oligonucleotides
with mixed PO/PS internucleoside linkages in A431 cells

| | SEQ ID | SEQ ID | SEQ ID | SEQ ID | | | |
|---|---|---|---|---|---|---|---|
| Compound | No: 1 | No: 1 | No: 2 | No: 2 | | MSH3 | SEQ |
| Number | Start Site | Stop Site | Start Site | Stop Site | Sequence (5′ to 3′) | (% UTC) | ID No. |
| 1480790 | N/A | N/A | 35860 | 35879 | TCCGCTTTTTCCTTTAGGGA | 3 | 1008 |
| 1566462 | N/A | N/A | 84396 | 84415 | GTTCTTTCAAGTTTACGCTT | 18 | 3121 |
| 1566501 | N/A | N/A | 200829 | 200848 | GCACCATAATGTACCTTTCA | 44 | 3122 |
| 1566537 | N/A | N/A | 93998 | 94017 | AGTGACCTTTTAAAGTTGGC | 27 | 3123 |
| 1566584 | 690 | 709 | 18127 | 18146 | TGACTTGTATTTGATGATCC | 4 | 3124 |
| 1566610 | N/A | N/A | 36027 | 36046 | GCTCACATCATTGGTTATAC | 9 | 3125 |
| 1566628 | N/A | N/A | 108786 | 108805 | CCCCTTTGCCAGCTAGGCAA | 68 | 3126 |
| 1566648 | N/A | N/A | 26318 | 26337 | CCCTAACATCCTAAGCCAAT | 56 | 3127 |
| 1566682 | N/A | N/A | 216964 | 216983 | ACGCAATGGCCTCTACCTCA | 62 | 3128 |
| 1566715 | N/A | N/A | 125789 | 125808 | TGTCTGGTCTTTTTTTGCTC | 16 | 2204 |
| 1566734 | N/A | N/A | 36292 | 36311 | GAGGTTATTCTTATTCCCCA | 12 | 3129 |
| 1566735 | N/A | N/A | 86128 | 86147 | GCTGGTTTTTAAGTTAGCTC | 62 | 3130 |
| 1566738 | N/A | N/A | 35866 | 35885 | TCTGTATCCGCTTTTTCCTT | 11 | 3131 |
| 1566742 | N/A | N/A | 13367 | 13386 | ACTCATCTATAGCAGTTACA | 60 | 3132 |
| 1566752 | N/A | N/A | 81686 | 81705 | TTGGTTGTTTGCATATATCC | 16 | 3133 |
| 1566783 | N/A | N/A | 37047 | 37066 | GCCCTCTTTCTACCCAGTCC | 48 | 3134 |
| 1566807 | N/A | N/A | 87287 | 87306 | TTCACATGAATTCATGGTCA | 19 | 3135 |
| 1566935 | N/A | N/A | 40064 | 40083 | ACATGTTTATCTATCTATCT | 54 | 3136 |
| | | | 40092 | 40111 | | | |
| | | | 40120 | 40139 | | | |
| | | | 40148 | 40167 | | | |
| | | | 40248 | 40267 | | | |
| | | | 40275 | 40294 | | | |
| | | | 40326 | 40345 | | | |
| 1567000 | N/A | N/A | 61478 | 61497 | GGCAACCTCCCTTCTGTCCT | 58 | 3137 |
| 1567003 | N/A | N/A | 12247 | 12266 | CTGCATGTCAAAATTGTATT | 42 | 3138 |
| 1567013 | N/A | N/A | 27914 | 27933 | GGGCTTCTCTGCCTAGTCCA | 59 | 3139 |
| 1567082 | N/A | N/A | 50374 | 50393 | TGCAAGCCCACTCATCATGC | 66 | 3140 |
| 1567096 | N/A | N/A | 111679 | 111698 | GGACACTTTGACTTTGTGCA | 28 | 3141 |
| 1567195 | N/A | N/A | 114780 | 114799 | CTGCATACCCCTGCATACTA | 114 | 3142 |
| 1567215 | N/A | N/A | 142837 | 142856 | GCTTTACCACTGTCTGTCCT | 40 | 3143 |
| 1567255 | N/A | N/A | 57929 | 57948 | GCCACAAATTTTGCCTCCAA | 13 | 3144 |
| 1567296 | N/A | N/A | 166459 | 166478 | TGACTGGTCTTTAACTCTCT | 35 | 3145 |
| 1567353 | N/A | N/A | 178851 | 178870 | AGCAATCTTTCAATTTCCGT | 17 | 3146 |
| 1567426 | N/A | N/A | 42071 | 42090 | GCCATATGAACTTCCTATGT | 13 | 3147 |
| 1567438 | N/A | N/A | 29374 | 29393 | AGCTCTTGATCACCATTTCT | 59 | 3148 |
| 1567517 | N/A | N/A | 186128 | 186147 | CTTGCTTTGAACCATCAGAC | 40 | 3149 |
| 1567536 | N/A | N/A | 117993 | 118012 | GTCTGCTGAGTATAATATCT | 22 | 3150 |
| 1567555 | N/A | N/A | 36800 | 36819 | AAGCACTTCCTCTTAACCAA | 11 | 3151 |
| 1567575 | N/A | N/A | 31094 | 31113 | CTGTCAGCAGACAAATGGGT | 56 | 3152 |
| 1567583 | N/A | N/A | 11264 | 11283 | GGCTAGTTTTACCCATTGCA | 41 | 3153 |
| 1567590 | N/A | N/A | 129899 | 129918 | CTGTTAGCTCACTCTTCGCA | 27 | 3154 |
| 1567627 | N/A | N/A | 175573 | 175592 | GCTCACTTATCATGTGGATT | 22 | 3155 |
| 1567647 | N/A | N/A | 19228 | 19247 | TGTCATCTGCAATACTTTCC | 35 | 3156 |
| 1567656 | N/A | N/A | 4137 | 4156 | CCGGTCTTGATTCAATGAGC | 66 | 3157 |
| 1567684 | N/A | N/A | 40853 | 40872 | CTAAACATATACATGTGCAT | 30 | 3158 |
| | | | 40883 | 40902 | | | |
| | | | 40913 | 40932 | | | |
| | | | 40943 | 40962 | | | |
| | | | 40973 | 40992 | | | |
| | | | 41003 | 41022 | | | |
| 1567723 | N/A | N/A | 24861 | 24880 | ATGGTATTTCTAAATGCACT | 11 | 3159 |
| 1567768 | N/A | N/A | 14820 | 14839 | TGGCATTGCTGACCCCACCC | 76 | 3160 |
| 1567819 | N/A | N/A | 76338 | 76357 | GGCCATCTATAACATGTTGC | 87 | 3161 |
| 1567842 | N/A | N/A | 71253 | 71272 | GCTTGGCATCTATATCTAAA | 16 | 3162 |
| 1567855 | N/A | N/A | 95610 | 95629 | TCAGCAGATTCTCTCCAGGT | 16 | 3163 |
| 1567876 | N/A | N/A | 104348 | 104367 | CTGACATTGCCACCCTGTGC | 75 | 3164 |
| 1567885 | N/A | N/A | 20990 | 21009 | AGCACACCTAATCAAGGGTT | 44 | 3165 |
| 1567958 | N/A | N/A | 35487 | 35506 | TCCTTGGCTATGCCAGTGCT | 33 | 3166 |
| 1567995 | N/A | N/A | 19964 | 19983 | TCTTCTACATCCTTAGAGCT | 40 | 3167 |
| 1567998 | N/A | N/A | 68030 | 68049 | GCCACAGAGAGCTATACCCA | 40 | 3168 |
| 1568001 | N/A | N/A | 23717 | 23736 | ATGGACCAAGACCATCTGGA | 19 | 3169 |
| 1568008 | N/A | N/A | 209582 | 209601 | TTCCCCTTATGCTTCAGGCA | 108 | 3170 |
| 1568106 | N/A | N/A | 38786 | 38805 | CGAACTGATTTCATGATCTT | 30 | 3171 |
| 1568199 | N/A | N/A | 107518 | 107537 | GATCATGTGTCACTCTCTTC | 18 | 3172 |
| 1568250 | N/A | N/A | 78642 | 78661 | CCCCTTTTTTTACAAAGCCC | 61 | 3173 |
| 1568293 | N/A | N/A | 147738 | 147757 | GTTCATCCTCTGACATGTCT | 52 | 3174 |
| 1568384 | N/A | N/A | 182061 | 182080 | TGAACCAGTCATCAAGGCTA | 65 | 3175 |
| 1568417 | N/A | N/A | 124711 | 124730 | GCAACTTATTGATAACAGTA | 11 | 3176 |
| 1568954 | N/A | N/A | 101380 | 101399 | AGTCTCCCTACATTCCTGAC | 70 | 3177 |
| 1569008 | N/A | N/A | 74957 | 74976 | GCACTGCCACAAAGTCTGCT | 59 | 3178 |
| 1569054 | N/A | N/A | 22702 | 22721 | ATGATGGTTCATTTCACACA | 7 | 3179 |
| 1569073 | N/A | N/A | 164391 | 164410 | TGCACATGCTCTCTCTGAAA | 23 | 3180 |
| 1569227 | N/A | N/A | 25683 | 25702 | GCTCCAACTAAAAGCAAGGA | 49 | 3181 |
| 1569302 | N/A | N/A | 27629 | 27648 | AAGTGGTCTGATCTTAGATC | 4 | 3182 |
| 1569479 | N/A | N/A | 19448 | 19467 | GCCTAATTTAATATCACAGA | 33 | 3183 |
| 1569579 | N/A | N/A | 120855 | 120874 | CTGAGGGTCCCTTTTCCTCA | 91 | 3184 |
| 1569734 | N/A | N/A | 26585 | 26604 | ACCAGCCTACTTCTCTCATA | 23 | 3185 |
| 1569799 | N/A | N/A | 45276 | 45295 | AGGCACCTTTCTTATGGCAG | 24 | 3186 |
| 1569860 | N/A | N/A | 46999 | 47018 | TGCCGCTTTCTCACTCCACC | 25 | 3187 |
| 1570046 | N/A | N/A | 52452 | 52471 | GAAGCTTCACTCACTAAGCA | 47 | 3188 |
| 1570162 | N/A | N/A | 14196 | 14215 | ATGACTGCTTTTCCTTTAGT | 52 | 3189 |
| 1570244 | N/A | N/A | 160092 | 160111 | TATGGCTTTATATTGCACCT | 85 | 3190 |
| 1570248 | N/A | N/A | 138236 | 138255 | AGCTGCTACACATTTTCCAC | 44 | 3191 |
| 1570257 | N/A | N/A | 141451 | 141470 | CCTCTATCATGCCATGCACT | 61 | 3192 |
| 1570329 | N/A | N/A | 222066 | 222085 | GATCAACAATCTGTTCATCA | 38 | 3193 |
| 1570489 | N/A | N/A | 92887 | 92906 | TGGCTATCAACTCCTCAGTC | 60 | 3194 |
| 1570853 | N/A | N/A | 167953 | 167972 | TCTCCATCTCCCTTACTGCA | 33 | 3195 |
| 1570865 | N/A | N/A | 37167 | 37186 | AACAGCTCTTCTGCACTACA | 16 | 3196 |
| 1570941 | N/A | N/A | 21877 | 21896 | AGAGAACTGATTCCACCCCC | 50 | 3197 |

TABLE 54
Reduction of MSH3 RNA by 5-10-5 MOE modified oligonucleotides
with mixed PO/PS internucleoside linkages in A431 cells

| | SEQ ID | SEQ ID | SEQ ID | SEQ ID | | | |
|---|---|---|---|---|---|---|---|
| Compound | No: 1 | No: 1 | No: 2 | No: 2 | | MSH3 | SEQ |
| Number | Start Site | Stop Site | Start Site | Stop Site | Sequence (5′ to 3′) | (% UTC) | ID No. |
| 1480790 | N/A | N/A | 35860 | 35879 | TCCGCTTTTTCCTTTAGGGA | 2 | 1008 |
| 1566470 | N/A | N/A | 147663 | 147682 | GACATGCTTTCACTCCATGT | 58 | 3198 |
| 1566490 | N/A | N/A | 40063 | 40082 | CATGTTTATCTATCTATCTA | 59 | 3199 |
| | | | 40091 | 40110 | | | |
| | | | 40119 | 40138 | | | |
| | | | 40147 | 40166 | | | |
| | | | 40247 | 40266 | | | |
| | | | 40274 | 40293 | | | |
| | | | 40325 | 40344 | | | |
| 1566560 | N/A | N/A | 24670 | 24689 | AGAGCTGTCTAACACCAACA | 25 | 3200 |
| 1566570 | N/A | N/A | 38782 | 38801 | CTGATTTCATGATCTTAGGT | 7 | 3201 |
| 1566578 | N/A | N/A | 104311 | 104330 | CTTCAGGTATTATCTTGCAT | 16 | 3202 |
| 1566593 | N/A | N/A | 167952 | 167971 | CTCCATCTCCCTTACTGCAC | 43 | 3203 |
| 1566639 | N/A | N/A | 114771 | 114790 | CCTGCATACTACTGTAGTTT | 76 | 3204 |
| 1566662 | N/A | N/A | 50373 | 50392 | GCAAGCCCACTCATCATGCA | 28 | 3205 |
| 1566664 | N/A | N/A | 17935 | 17954 | GCAAACTATCCATAGGTTAC | 44 | 3206 |
| 1566665 | N/A | N/A | 81683 | 81702 | GTTGTTTGCATATATCCTTT | 7 | 3207 |
| 1566715 | N/A | N/A | 125789 | 125808 | TGTCTGGTCTTTTTTTGCTC | 18 | 2204 |
| 1566723 | N/A | N/A | 19961 | 19980 | TCTACATCCTTAGAGCTTTC | 57 | 3208 |
| 1566766 | N/A | N/A | 14195 | 14214 | TGACTGCTTTTCCTTTAGTC | 55 | 3209 |
| 1566768 | N/A | N/A | 182060 | 182079 | GAACCAGTCATCAAGGCTAC | 61 | 3210 |
| 1566832 | N/A | N/A | 26311 | 26330 | ATCCTAAGCCAATAATAGCA | 94 | 3211 |
| 1566929 | N/A | N/A | 222046 | 222065 | TGGTCATATGATTATCAACC | 21 | 3212 |
| 1566937 | N/A | N/A | 164351 | 164370 | ACTCATCCTTCAGATAGGCA | 20 | 3213 |
| 1566946 | N/A | N/A | 178673 | 178692 | GGGCAACTCATCCTCTAACA | 68 | 3214 |
| 1566952 | N/A | N/A | 61439 | 61458 | AAGACAGTCATCTCGGTCTC | 59 | 3215 |
| 1566957 | N/A | N/A | 14818 | 14837 | GCATTGCTGACCCCACCCTA | 55 | 3216 |
| 1566986 | N/A | N/A | 57909 | 57928 | CAGCACCTTTTTCACTCCAG | 18 | 3217 |
| 1566995 | N/A | N/A | 111486 | 111505 | TGGCACCCACATTGCAACTT | 32 | 3218 |
| 1567035 | N/A | N/A | 20989 | 21008 | GCACACCTAATCAAGGGTTC | 66 | 3219 |
| 1567100 | N/A | N/A | 74918 | 74937 | GAGCAACACATGCTCTGCTT | 71 | 3220 |
| 1567179 | N/A | N/A | 37166 | 37185 | ACAGCTCTTCTGCACTACAT | 34 | 3221 |
| 1567196 | N/A | N/A | 174351 | 174370 | ATGCAAATATCTCATTCTGC | 32 | 3222 |
| 1567204 | N/A | N/A | 71232 | 71251 | TGGCAAGGTCCCTACCTTGC | 124 | 3223 |
| 1567266 | N/A | N/A | 22696 | 22715 | GTTCATTTCACACAGTACTT | 12 | 3224 |
| 1567288 | N/A | N/A | 45260 | 45279 | GCAGGGCCATTCCTCTGTCA | 120 | 3225 |
| 1567321 | N/A | N/A | 19416 | 19435 | GCATCTGACTTTGAGAACGC | 47 | 3226 |
| 1567371 | N/A | N/A | 36679 | 36698 | GTTGGACTTCAGTCATAACA | 58 | 3227 |
| 1567489 | N/A | N/A | 129897 | 129916 | GTTAGCTCACTCTTCGCAAC | 28 | 3228 |
| 1567611 | N/A | N/A | 26584 | 26603 | CCAGCCTACTTCTCTCATAA | 48 | 3229 |
| 1567687 | N/A | N/A | 21752 | 21771 | CTGCATTTATAAATGACCGT | 10 | 3230 |
| 1567688 | N/A | N/A | 76337 | 76356 | GCCATCTATAACATGTTGCT | 107 | 3231 |
| 1567706 | N/A | N/A | 215534 | 215553 | GGGTCTTCAAAGCCAGCTCC | 52 | 3232 |
| 1567748 | N/A | N/A | 204930 | 204949 | CTGCTTTTTCAACACTGTAC | 27 | 3233 |
| 1567751 | N/A | N/A | 12217 | 12236 | GACCCATCTCAAATCTACCT | 49 | 3234 |
| 1567775 | N/A | N/A | 29373 | 29392 | GCTCTTGATCACCATTTCTC | 64 | 3235 |
| 1567777 | N/A | N/A | 52403 | 52422 | ATGCATTCCACTTTTGAGGT | 15 | 3236 |
| 1567779 | N/A | N/A | 87250 | 87269 | TTTGGCTGATAGCCTGGGCT | 70 | 3237 |
| 1567841 | N/A | N/A | 42019 | 42038 | GCTCCATTGCTTCATTTGCT | 19 | 3238 |
| 1567882 | N/A | N/A | 30361 | 30380 | CAGCAGGTACTATTTCAGGC | 1 | 3239 |
| 1567920 | N/A | N/A | 27628 | 27647 | AGTGGTCTGATCTTAGATCC | 18 | 3240 |
| 1567962 | N/A | N/A | 35486 | 35505 | CCTTGGCTATGCCAGTGCTC | 42 | 3241 |
| 1567964 | N/A | N/A | 95609 | 95628 | CAGCAGATTCTCTCCAGGTA | 12 | 3242 |
| 1568010 | N/A | N/A | 46998 | 47017 | GCCGCTTTCTCACTCCACCG | 24 | 3243 |
| 1568022 | N/A | N/A | 107512 | 107531 | GTGTCACTCTCTTCCTCCTA | 46 | 3244 |
| 1568051 | N/A | N/A | 36290 | 36309 | GGTTATTCTTATTCCCCAAC | 2 | 3245 |
| 1568076 | N/A | N/A | 101179 | 101198 | TCTCAAGTTCAACATGGGCT | 68 | 3246 |
| 1568107 | N/A | N/A | 40836 | 40855 | CATGTATATTTATCTAAACA | 97 | 3247 |
| | | | 40866 | 40885 | | | |
| | | | 40896 | 40915 | | | |
| | | | 40926 | 40945 | | | |
| | | | 40956 | 40975 | | | |
| | | | 40986 | 41005 | | | |
| | | | 41016 | 41035 | | | |
| 1568133 | N/A | N/A | 78359 | 78378 | TCCCCTGCATGTCTTCACTT | 132 | 3248 |
| 1568151 | N/A | N/A | 23715 | 23734 | GGACCAAGACCATCTGGATC | 28 | 3249 |
| 1568190 | 557 | 576 | 13261 | 13280 | ATTTTGGCAGAACTGCAAAT | 52 | 3250 |
| 1568213 | N/A | N/A | 117619 | 117638 | GTAGCATGCCTCAAGACCCA | 43 | 3251 |
| 1568257 | N/A | N/A | 108755 | 108774 | TCATGGTAACTCCATCAGCC | 62 | 3252 |
| 1568261 | N/A | N/A | 159889 | 159908 | ATGATAAAAATAAAATGAAT | 68 | 3253 |
| | | | 159957 | 159976 | | | |
| 1568370 | N/A | N/A | 84294 | 84313 | GTTCTTTCACATCTAGTATC | 37 | 3254 |
| 1568374 | N/A | N/A | 35865 | 35884 | CTGTATCCGCTTTTTCCTTT | 5 | 3255 |
| 1568379 | N/A | N/A | 142788 | 142807 | TCCCAATCGCCATTTCTCGC | 43 | 3256 |
| 1568424 | N/A | N/A | 124661 | 124680 | ACAGCTGTATATACTTCCCT | 40 | 3257 |
| 1569178 | N/A | N/A | 67709 | 67728 | AGGTATAGTACCTAATGGCT | 39 | 3258 |
| 1569189 | N/A | N/A | 92886 | 92905 | GGCTATCAACTCCTCAGTCT | 68 | 3259 |
| 1569201 | N/A | N/A | 138159 | 138178 | ATCCTATACACATCTCCACG | 52 | 3260 |
| 1569281 | N/A | N/A | 11253 | 11272 | CCCATTGCAGTCATTCACTA | 87 | 3261 |
| 1569292 | N/A | N/A | 141416 | 141435 | AGCCTATCTTCTCTGCTATA | 127 | 3262 |
| 1569498 | N/A | N/A | 27882 | 27901 | GTCAATATACAGTCTACTTC | 7 | 3263 |
| 1569559 | N/A | N/A | 200798 | 200817 | AGTCATGGTCAAATTGCACC | 57 | 3264 |
| 1569962 | N/A | N/A | 120851 | 120870 | GGGTCCCTTTTCCTCACTCA | 64 | 3265 |
| 1570004 | N/A | N/A | 4136 | 4155 | CGGTCTTGATTCAATGAGCC | 49 | 3266 |
| 1570168 | N/A | N/A | 37028 | 37047 | CCACCTTCCCACCTAATTTA | 109 | 3267 |
| 1570352 | N/A | N/A | 19223 | 19242 | TCTGCAATACTTTCCCTAAG | 51 | 3268 |
| 1570412 | N/A | N/A | 165883 | 165902 | AAGACATCATAAGTTGTCAC | 73 | 3269 |
| 1570580 | N/A | N/A | 186056 | 186075 | TTGCCAGTCAACTAGTGCTA | 83 | 3270 |
| 1570715 | N/A | N/A | 36002 | 36021 | GTGACAAATTATAACTACAC | 19 | 3271 |
| 1570766 | N/A | N/A | 93919 | 93938 | GTGTCTTCAAGCCTATGACC | 52 | 3272 |
| 1570769 | N/A | N/A | 25659 | 25678 | ATCATCTTCAAAGTCTGGAT | 14 | 3273 |
| 1570887 | N/A | N/A | 85686 | 85705 | AGCACCTATTTCCATTAGAA | 26 | 3274 |

TABLE 55
Reduction of MSH3 RNA by 5-10-5 MOE modified oligonucleotides
with mixed PO/PS internucleoside linkages in A431 cells

| | SEQ ID | SEQ ID | SEQ ID | SEQ ID | | | |
|---|---|---|---|---|---|---|---|
| Compound | No: 1 | No: 1 | No: 2 | No: 2 | | MSH3 | SEQ |
| Number | Start Site | Stop Site | Start Site | Stop Site | Sequence (5′ to 3′) | (% UTC) | ID No. |
| 1480790 | N/A | N/A | 35860 | 35879 | TCCGCTTTTTCCTTTAGGGA | 2 | 1008 |
| 1566449 | N/A | N/A | 171065 | 171084 | GCTCTTTTTCACATATTGTA | 55 | 3275 |
| 1566519 | N/A | N/A | 37164 | 37183 | AGCTCTTCTGCACTACATTC | 32 | 3276 |
| 1566636 | N/A | N/A | 11245 | 11264 | AGTCATTCACTAATCAGAGC | 14 | 3277 |
| 1566673 | N/A | N/A | 147661 | 147680 | CATGCTTTCACTCCATGTGT | 93 | 3278 |
| 1566696 | N/A | N/A | 24667 | 24686 | GCTGTCTAACACCAACAGGA | 41 | 3279 |
| 1566715 | N/A | N/A | 125789 | 125808 | TGTCTGGTCTTTTTTTGCTC | 17 | 2204 |
| 1566724 | N/A | N/A | 36678 | 36697 | TTGGACTTCAGTCATAACAC | 61 | 3280 |
| 1566759 | N/A | N/A | 113802 | 113821 | GAGGATATATACTCCACCAA | 69 | 3281 |
| 1566924 | N/A | N/A | 57907 | 57926 | GCACCTTTTTCACTCCAGGG | 15 | 3282 |
| 1566925 | N/A | N/A | 95607 | 95626 | GCAGATTCTCTCCAGGTATT | 15 | 3283 |
| 1566981 | N/A | N/A | 111484 | 111503 | GCACCCACATTGCAACTTCA | 46 | 3284 |
| 1566984 | N/A | N/A | 14813 | 14832 | GCTGACCCCACCCTAATGGT | 63 | 3285 |
| 1567025 | N/A | N/A | 46997 | 47016 | CCGCTTTCTCACTCCACCGT | 24 | 3286 |
| 1567043 | N/A | N/A | 93781 | 93800 | GCTCATAAAGCTCCTAGCAT | 48 | 3287 |
| 1567072 | N/A | N/A | 92809 | 92828 | ATGTCTGCCAATCTGCAGGC | 55 | 3288 |
| 1567083 | N/A | N/A | 26581 | 26600 | GCCTACTTCTCTCATAAGGT | 40 | 3289 |
| 1567185 | N/A | N/A | 4135 | 4154 | GGTCTTGATTCAATGAGCCT | 60 | 3290 |
| 1567187 | N/A | N/A | 40747 | 40766 | TATGTATATTTATCTAAACA | 63 | 3291 |
| | | | 40806 | 40825 | | | |
| 1567275 | N/A | N/A | 35863 | 35882 | GTATCCGCTTTTTCCTTTAG | 10 | 3292 |
| 1567294 | N/A | N/A | 19395 | 19414 | GCTTGCCTGCCACAGAGGAT | 46 | 3293 |
| 1567334 | N/A | N/A | 167951 | 167970 | TCCATCTCCCTTACTGCACT | 27 | 3294 |
| 1567364 | N/A | N/A | 165764 | 165783 | GGTGATACTCTAATTCTTGT | 23 | 3295 |
| 1567387 | N/A | N/A | 71231 | 71250 | GGCAAGGTCCCTACCTTGCT | 53 | 3296 |
| 1567403 | N/A | N/A | 180924 | 180943 | GTCCCTTCAAATCACAATCT | 112 | 3297 |
| 1567422 | N/A | N/A | 136517 | 136536 | GCCTAGTCTTACTTTTTCTT | 43 | 3298 |
| 1567487 | N/A | N/A | 101144 | 101163 | CATGGGTCTCATTTTCACCT | 30 | 3299 |
| 1567639 | N/A | N/A | 25558 | 25577 | GGAACATCCTTAATTCTAGC | 15 | 3300 |
| 1567742 | N/A | N/A | 45254 | 45273 | CCATTCCTCTGTCAACATAA | 26 | 3301 |
| 1567749 | N/A | N/A | 124637 | 124656 | CCTTGTCTTTAAATGAGTCC | 59 | 3302 |
| 1567836 | N/A | N/A | 141415 | 141434 | GCCTATCTTCTCTGCTATAC | 58 | 3303 |
| 1567903 | N/A | N/A | 19958 | 19977 | ACATCCTTAGAGCTTTCCCT | 73 | 3304 |
| 1567927 | N/A | N/A | 26179 | 26198 | CCCCAATCCACACTGTTAGC | 50 | 3305 |
| 1567938 | N/A | N/A | 108616 | 108635 | ATAGCTTGCATTACCTTGGC | 41 | 3306 |
| 1567953 | N/A | N/A | 36289 | 36308 | GTTATTCTTATTCCCCAACA | 8 | 3307 |
| 1567967 | N/A | N/A | 35481 | 35500 | GCTATGCCAGTGCTCAGGAA | 4 | 3308 |
| 1567968 | N/A | N/A | 14194 | 14213 | GACTGCTTTTCCTTTAGTCT | 60 | 3309 |
| 1568000 | N/A | N/A | 85646 | 85665 | AGGGTTATATCTACCAGCAT | 39 | 3310 |
| 1568036 | N/A | N/A | 50370 | 50389 | AGCCCACTCATCATGCATTC | 47 | 3311 |
| 1568062 | N/A | N/A | 19221 | 19240 | TGCAATACTTTCCCTAAGTT | 63 | 3312 |
| 1568124 | N/A | N/A | 12216 | 12235 | ACCCATCTCAAATCTACCTT | 51 | 3313 |
| 1568156 | N/A | N/A | 222045 | 222064 | GGTCATATGATTATCAACCA | 32 | 3314 |
| 1568194 | N/A | N/A | 20977 | 20996 | AAGGGTTCACCTTAATGCCT | 63 | 3315 |
| 1568221 | 547 | 566 | 13251 | 13270 | AACTGCAAATCTCTCCTGCA | 31 | 3316 |
| 1568239 | N/A | N/A | 30214 | 30233 | GAGCTAGTTTTCCAACTCAA | 49 | 3317 |
| 1568244 | N/A | N/A | 29363 | 29382 | ACCATTTCTCATATTACCAT | 16 | 3318 |
| 1568327 | N/A | N/A | 164255 | 164274 | ACATCTTGCATATAGCCTTC | 35 | 3319 |
| 1568368 | N/A | N/A | 23714 | 23733 | GACCAAGACCATCTGGATCT | 57 | 3320 |
| 1568383 | N/A | N/A | 40059 | 40078 | TTTATCTATCTATCTAAACA | 122 | 3321 |
| | | | 40087 | 40106 | | | |
| | | | 40115 | 40134 | | | |
| | | | 40143 | 40162 | | | |
| | | | 40243 | 40262 | | | |
| | | | 40321 | 40340 | | | |
| 1568408 | N/A | N/A | 76336 | 76355 | CCATCTATAACATGTTGCTA | 49 | 3322 |
| 1568426 | N/A | N/A | 38758 | 38777 | GTCTTAGATCAACTGGATTA | 27 | 3323 |
| 1569002 | N/A | N/A | 186038 | 186057 | TAGAGACTTTCTCCCCAGCT | 85 | 3324 |
| 1569062 | N/A | N/A | 87226 | 87245 | GTTGGTATCTAACCAGTTAC | 84 | 3325 |
| 1569063 | N/A | N/A | 104309 | 104328 | TCAGGTATTATCTTGCATTT | 31 | 3326 |
| 1569068 | N/A | N/A | 178672 | 178691 | GGCAACTCATCCTCTAACAT | 35 | 3327 |
| 1569076 | N/A | N/A | 22688 | 22707 | CACACAGTACTTCTGCCCTT | 30 | 3328 |
| 1569093 | N/A | N/A | 215473 | 215492 | CTGCCATCCTCTGCTAAGGA | 60 | 3329 |
| 1569118 | N/A | N/A | 142750 | 142769 | CCCTGTTTTCCTCTATGGCA | 65 | 3330 |
| 1569152 | N/A | N/A | 200731 | 200750 | TGTGATGTCAACACATGGGC | 64 | 3331 |
| 1569188 | N/A | N/A | 27874 | 27893 | ACAGTCTACTTCGCTGAAGC | 25 | 3332 |
| 1569204 | N/A | N/A | 158436 | 158455 | TCCTCTTTTAAGCATCTACC | 50 | 3333 |
| 1569357 | N/A | N/A | 17684 | 17703 | GGCAAAACCACTTTGAGCAA | 74 | 3334 |
| 1569395 | N/A | N/A | 27627 | 27646 | GTGGTCTGATCTTAGATCCA | 49 | 3335 |
| 1569722 | N/A | N/A | 35988 | 36007 | CTACACATCCCTACCTTGTC | 45 | 3336 |
| 1569958 | N/A | N/A | 84280 | 84299 | AGTATCATTTTCTTAGTGTC | 16 | 3337 |
| 1570087 | N/A | N/A | 74860 | 74879 | CTGGTACCACGGATAGGTCA | 76 | 3338 |
| 1570131 | N/A | N/A | 67675 | 67694 | TGCAGATATATTACAACTGT | 44 | 3339 |
| 1570197 | N/A | N/A | 129895 | 129914 | TAGCTCACTCTTCGCAACTC | 36 | 3340 |
| 1570266 | N/A | N/A | 21712 | 21731 | TGCACATTGAAAATTCTTAC | 12 | 3341 |
| 1570269 | N/A | N/A | 42018 | 42037 | CTCCATTGCTTCATTTGCTA | 19 | 3342 |
| 1570270 | N/A | N/A | 107501 | 107520 | TTCCTCCTACTCTAAGTTCC | 73 | 3343 |
| 1570379 | N/A | N/A | 78304 | 78323 | GAGTACGATTTCACATGTTT | 12 | 3344 |
| 1570389 | N/A | N/A | 61427 | 61446 | TCGGTCTCTCAGTCATTACA | 21 | 3345 |
| 1570571 | N/A | N/A | 37022 | 37041 | TCCCACCTAATTTAGGCACC | 24 | 3346 |
| 1570662 | N/A | N/A | 204836 | 204855 | GTATCTGACATGACTGCCTA | 34 | 3347 |
| 1570732 | N/A | N/A | 117548 | 117567 | CTGGTTCTCATTCAGACATT | 16 | 3348 |
| 1570757 | N/A | N/A | 81654 | 81673 | CCTGTATGGATCATTTGTCC | 47 | 3349 |
| 1570824 | N/A | N/A | 52310 | 52329 | GTTTTCTACACTTAGCCAGT | 15 | 3350 |
| 1570871 | N/A | N/A | 120605 | 120624 | TAGCAACTTTTCCTGGTCTA | 18 | 3351 |

TABLE 56
Reduction of MSH3 RNA by 5-10-5 MOE modified oligonucleotides
with mixed PO/PS internucleoside linkages in A431 cells

| | SEQ ID | SEQ ID | SEQ ID | SEQ ID | | | |
|---|---|---|---|---|---|---|---|
| Compound | No: 1 | No: 1 | No: 2 | No: 2 | | MSH3 | SEQ |
| Number | Start Site | Stop Site | Start Site | Stop Site | Sequence (5′ to 3′) | (% UTC) | ID No. |
| 1480790 | N/A | N/A | 35860 | 35879 | TCCGCTTTTTCCTTTAGGGA | 3 | 1008 |
| 1566557 | N/A | N/A | 37163 | 37182 | GCTCTTCTGCACTACATTCT | 29 | 3352 |
| 1566616 | N/A | N/A | 36288 | 36307 | TTATTCTTATTCCCCAACAT | 30 | 3353 |
| 1566631 | N/A | N/A | 40058 | 40077 | TTATCTATCTATCTAAACAT | 89 | 3354 |
| | | | 40086 | 40105 | | | |
| | | | 40114 | 40133 | | | |
| | | | 40142 | 40161 | | | |
| | | | 40242 | 40261 | | | |
| | | | 40320 | 40339 | | | |
| 1566715 | N/A | N/A | 125789 | 125808 | TGTCTGGTCTTTTTTTGCTC | 19 | 2204 |
| 1566722 | N/A | N/A | 120526 | 120545 | GCAATCTCTCATATTCTTCT | 5 | 3355 |
| 1566824 | N/A | N/A | 29243 | 29262 | GCAGCTCTCCTTACAAGTTT | 4 | 3356 |
| 1566840 | N/A | N/A | 37021 | 37040 | CCCACCTAATTTAGGCACCA | 18 | 3357 |
| 1566862 | N/A | N/A | 107500 | 107519 | TCCTCCTACTCTAAGTTCCA | 64 | 3358 |
| 1566901 | N/A | N/A | 20976 | 20995 | AGGGTTCACCTTAATGCCTC | 51 | 3359 |
| 1567005 | N/A | N/A | 117547 | 117566 | TGGTTCTCATTCAGACATTA | 11 | 3360 |
| 1567080 | N/A | N/A | 40746 | 40765 | ATGTATATTTATCTAAACAT | 82 | 3361 |
| | | | 40805 | 40824 | | | |
| | | | 40835 | 40854 | | | |
| | | | 40865 | 40884 | | | |
| | | | 40895 | 40914 | | | |
| | | | 40925 | 40944 | | | |
| | | | 40955 | 40974 | | | |
| | | | 40985 | 41004 | | | |
| | | | 41015 | 41034 | | | |
| 1567194 | N/A | N/A | 24656 | 24675 | CCAACAGGAATGCTAACTCT | 49 | 3362 |
| 1567259 | N/A | N/A | 36677 | 36696 | TGGACTTCAGTCATAACACA | 31 | 3363 |
| 1567291 | N/A | N/A | 35982 | 36001 | ATCCCTACCTTGTCCTGGTT | 39 | 3364 |
| 1567308 | N/A | N/A | 164242 | 164261 | AGCCTTCATTGACTTGTCAT | 23 | 3365 |
| 1567331 | N/A | N/A | 21711 | 21730 | GCACATTGAAAATTCTTACC | 5 | 3366 |
| 1567378 | N/A | N/A | 85645 | 85664 | GGGTTATATCTACCAGCATC | 31 | 3367 |
| 1567381 | N/A | N/A | 27624 | 27643 | GTCTGATCTTAGATCCAGTA | 33 | 3368 |
| 1567384 | N/A | N/A | 71200 | 71219 | TCTTGGCTACTCCTGGCCCT | 50 | 3369 |
| 1567394 | N/A | N/A | 19943 | 19962 | TCCCTACACAAAGACTATCC | 84 | 3370 |
| 1567399 | N/A | N/A | 61425 | 61444 | GGTCTCTCAGTCATTACACA | 17 | 3371 |
| 1567406 | N/A | N/A | 66757 | 66776 | CAAGACTTGTTCATCACTAC | 18 | 3372 |
| 1567440 | N/A | N/A | 50369 | 50388 | GCCCACTCATCATGCATTCT | 53 | 3373 |
| 1567468 | N/A | N/A | 95347 | 95366 | CCAGAGATACATGATTCGGC | 28 | 3374 |
| 1567506 | N/A | N/A | 38752 | 38771 | GATCAACTGGATTATCAGCT | 6 | 3375 |
| 1567569 | N/A | N/A | 147660 | 147679 | ATGCTTTCACTCCATGTGTT | 45 | 3376 |
| 1567664 | N/A | N/A | 42003 | 42022 | TGCTACTCTCTCCATATGCC | 21 | 3377 |
| 1567666 | N/A | N/A | 23704 | 23723 | ATCTGGATCTCTCCATAGCA | 24 | 3378 |
| 1567713 | N/A | N/A | 92742 | 92761 | GCCAGTCTATTGCTCAGTTC | 39 | 3379 |
| 1567794 | N/A | N/A | 46995 | 47014 | GCTTTCTCACTCCACCGTTT | 10 | 3380 |
| 1567864 | N/A | N/A | 17675 | 17694 | ACTTTGAGCAAAGCATGCCA | 59 | 3381 |
| 1567866 | N/A | N/A | 111445 | 111464 | TTGCGACTATCAGCACAGCT | 60 | 3382 |
| 1567921 | N/A | N/A | 22684 | 22703 | CAGTACTTCTGCCCTTTGCA | 21 | 3383 |
| 1567923 | N/A | N/A | 113108 | 113127 | GCAGGTTGTTCTCAAGTTTC | 17 | 3384 |
| 1567928 | N/A | N/A | 200487 | 200506 | TGGTTCACCCTGTCTACCAC | 70 | 3385 |
| 1567939 | N/A | N/A | 104127 | 104146 | GTTCTTTAGTCCATTCAGTC | 16 | 3386 |
| 1567973 | N/A | N/A | 14185 | 14204 | TCCTTTAGTCTCACCTCATC | 53 | 3387 |
| 1567979 | N/A | N/A | 26178 | 26197 | CCCAATCCACACTGTTAGCC | 29 | 3388 |
| 1568004 | N/A | N/A | 10050 | 10069 | TGGTCCCTCACTGACTGTCA | 96 | 3389 |
| 1568026 | N/A | N/A | 74214 | 74233 | GTCTATTCACCTCACCATCC | 48 | 3390 |
| 1568115 | N/A | N/A | 76299 | 76318 | GTCTGATCAATTTCATGTCT | 59 | 3391 |
| 1568132 | N/A | N/A | 100702 | 100721 | GACCATGGCTACCTTCTTGA | 36 | 3392 |
| 1568169 | N/A | N/A | 27805 | 27824 | CGGAGTCTTTCCAACAAGGC | 20 | 3393 |
| 1568178 | N/A | N/A | 215335 | 215354 | TGTCTCTTCTTCCTTTGGAC | 53 | 3394 |
| 1568225 | N/A | N/A | 108615 | 108634 | TAGCTTGCATTACCTTGGCT | 50 | 3395 |
| 1568267 | N/A | N/A | 57814 | 57833 | CCTCATCTACCTCTGATGCC | 37 | 3396 |
| 1568322 | N/A | N/A | 171014 | 171033 | CCAGGACCAAGTCACTGCAA | 71 | 3397 |
| 1568353 | N/A | N/A | 165763 | 165782 | GTGATACTCTAATTCTTGTC | 15 | 3398 |
| 1568354 | 469 | 488 | 13173 | 13192 | TTTTTCCAGAGACTTTGAAA | 27 | 3399 |
| 1568356 | N/A | N/A | 129894 | 129913 | AGCTCACTCTTCGCAACTCT | 21 | 3400 |
| 1568365 | N/A | N/A | 19353 | 19372 | GTTGGCCAAGTCTTTACTTC | 54 | 3401 |
| 1568391 | N/A | N/A | 78258 | 78277 | CGTGGCCTTCAGCAACTTTA | 95 | 3402 |
| 1569026 | N/A | N/A | 35470 | 35489 | GCTCAGGAAGCTCTCATTTC | 18 | 3403 |
| 1569056 | N/A | N/A | 35823 | 35842 | TTCAACTGTCCCATCTAGGC | 9 | 3404 |
| 1569097 | N/A | N/A | 185851 | 185870 | ATGCATCTCTAGTCCTGACT | 54 | 3405 |
| 1569124 | 2543 | 2562 | 135592 | 135611 | GGTGATGCACTGCTTTACAC | 23 | 3406 |
| 1569147 | N/A | N/A | 3871 | 3890 | CATAAGTCCTTCACCAGCTA | 56 | 3407 |
| 1569275 | N/A | N/A | 45245 | 45264 | TGTCAACATAAGACTCTGCA | 27 | 3408 |
| 1569310 | N/A | N/A | 25557 | 25576 | GAACATCCTTAATTCTAGCC | 36 | 3409 |
| 1569349 | N/A | N/A | 203776 | 203795 | ACAACCTATTTGCTGCACAA | 51 | 3410 |
| 1569352 | N/A | N/A | 14812 | 14831 | CTGACCCCACCCTAATGGTC | 58 | 3411 |
| 1569439 | N/A | N/A | 180758 | 180777 | TGGACATACTTCAAGTGCTT | 27 | 3412 |
| 1569495 | N/A | N/A | 93706 | 93725 | ATGAGGTGTTCCACCATGTC | 51 | 3413 |
| 1569674 | N/A | N/A | 52180 | 52199 | ACCCACGCAGGTCACCCTCA | 68 | 3414 |
| 1569703 | N/A | N/A | 124533 | 124552 | CATCAATTCATGATCTGGGT | 11 | 3415 |
| 1569789 | N/A | N/A | 222026 | 222045 | AGGGTACTAATGTACCCAGC | 53 | 3416 |
| 1569792 | N/A | N/A | 142247 | 142266 | CAGGATTCGCCATTCCAGCC | 58 | 3417 |
| 1569804 | N/A | N/A | 81629 | 81648 | CTGAGTTATCTTTTTACCAT | 11 | 3418 |
| 1570058 | N/A | N/A | 26509 | 26528 | GCACTGTACAAATAGTAGTT | 17 | 3419 |
| 1570277 | N/A | N/A | 141405 | 141424 | TCTGCTATACAACAAGCTCT | 102 | 3420 |
| 1570299 | N/A | N/A | 178667 | 178686 | CTCATCCTCTAACATAGCTA | 37 | 3421 |
| 1570452 | N/A | N/A | 83886 | 83905 | CTGGCATGTATACATTATCT | 18 | 3422 |
| 1570457 | N/A | N/A | 12182 | 12201 | CTGCTAATTTTCACAGCTTA | 49 | 3423 |
| 1570466 | N/A | N/A | 87190 | 87209 | GAGTCCTTACTTCCGCTGTT | 21 | 3424 |
| 1570479 | N/A | N/A | 167950 | 167969 | CCATCTCCCTTACTGCACTT | 53 | 3425 |
| 1570532 | N/A | N/A | 30180 | 30199 | GAGTCCACACTGTTTGACCC | 69 | 3426 |
| 1570617 | N/A | N/A | 158392 | 158411 | AGGCATGTATAAAACTGTTC | 42 | 3427 |
| 1570668 | N/A | N/A | 19220 | 19239 | GCAATACTTTCCCTAAGTTT | 27 | 3428 |

TABLE 57
Reduction of MSH3 RNA by 5-10-5 MOE modified oligonucleotides
with mixed PO/PS internucleoside linkages in A431 cells

| | SEQ ID | SEQ ID | SEQ ID | SEQ ID | | | |
|---|---|---|---|---|---|---|---|
| Compound | No: 1 | No: 1 | No: 2 | No: 2 | | MSH3 | SEQ |
| Number | Start Site | Stop Site | Start Site | Stop Site | Sequence (5′ to 3′) | (% UTC) | ID No. |
| 1480790 | N/A | N/A | 35860 | 35879 | TCCGCTTTTTCCTTTAGGGA | 2 | 1008 |
| 1566466 | N/A | N/A | 78235 | 78254 | TTGGCTTAATATACTGTTCA | 24 | 3429 |
| 1566494 | 443 | 462 | 13147 | 13166 | TGGTCCTCAGACATTTCTTT | 25 | 3430 |
| 1566575 | N/A | N/A | 180750 | 180769 | CTTCAAGTGCTTTTAAAAAT | 99 | 3431 |
| | | | 182494 | 182513 | | | |
| 1566601 | N/A | N/A | 164188 | 164207 | GGTTAATGCTGATTTTCTCC | 8 | 3432 |
| 1566602 | N/A | N/A | 35961 | 35980 | TCCACCTAGCTCTTTAATTC | 63 | 3433 |
| 1566619 | N/A | N/A | 87103 | 87122 | CGTCGACTCTAGAACGGTGC | 54 | 3434 |
| 1566635 | N/A | N/A | 107497 | 107516 | TCCTACTCTAAGTTCCAGTC | 42 | 3435 |
| 1566641 | N/A | N/A | 178449 | 178468 | GCTGCATCCTTATAAACTGC | 51 | 3436 |
| 1566655 | N/A | N/A | 108614 | 108633 | AGCTTGCATTACCTTGGCTA | 93 | 3437 |
| 1566670 | N/A | N/A | 37161 | 37180 | TCTTCTGCACTACATTCTGT | 52 | 3438 |
| 1566698 | N/A | N/A | 40057 | 40076 | TATCTATCTATCTAAACATA | 116 | 3439 |
| | | | 40085 | 40104 | | | |
| | | | 40113 | 40132 | | | |
| | | | 40141 | 40160 | | | |
| | | | 40241 | 40260 | | | |
| | | | 40319 | 40338 | | | |
| 1566715 | N/A | N/A | 125789 | 125808 | TGTCTGGTCTTTTTTTGCTC | 17 | 2204 |
| 1566762 | N/A | N/A | 103683 | 103702 | GCTGCAGCAGTCAATTCACT | 86 | 3440 |
| 1566785 | N/A | N/A | 17669 | 17688 | AGCAAAGCATGCCAACAGAT | 34 | 3441 |
| 1566811 | N/A | N/A | 27804 | 27823 | GGAGTCTTTCCAACAAGGCA | 50 | 3442 |
| 1566879 | N/A | N/A | 42002 | 42021 | GCTACTCTCTCCATATGCCA | 34 | 3443 |
| 1566922 | N/A | N/A | 35822 | 35841 | TCAACTGTCCCATCTAGGCA | 10 | 3444 |
| 1566942 | N/A | N/A | 26495 | 26514 | GTAGTTATCACTCAAAGTAA | 46 | 3445 |
| 1566960 | N/A | N/A | 35468 | 35487 | TCAGGAAGCTCTCATTTCTT | 84 | 3446 |
| 1566968 | N/A | N/A | 23703 | 23722 | TCTGGATCTCTCCATAGCAT | 31 | 3447 |
| 1567140 | N/A | N/A | 61421 | 61440 | TCTCAGTCATTACACAGGGC | 7 | 3448 |
| 1567186 | N/A | N/A | 14184 | 14203 | CCTTTAGTCTCACCTCATCT | 63 | 3449 |
| 1567200 | N/A | N/A | 92404 | 92423 | GTCATATATACCTAGCACAA | 21 | 3450 |
| 1567246 | N/A | N/A | 129893 | 129912 | GCTCACTCTTCGCAACTCTC | 24 | 3451 |
| 1567248 | N/A | N/A | 21616 | 21635 | GGCTACCACTATATTTTATA | 52 | 3452 |
| 1567290 | N/A | N/A | 19941 | 19960 | CCTACACAAAGACTATCCAA | 67 | 3453 |
| 1567310 | N/A | N/A | 134982 | 135001 | GGTACTTTTTTCACTTATCT | 19 | 3454 |
| 1567333 | N/A | N/A | 200486 | 200505 | GGTTCACCCTGTCTACCACT | 86 | 3455 |
| 1567337 | N/A | N/A | 142245 | 142264 | GGATTCGCCATTCCAGCCAA | 67 | 3456 |
| 1567377 | N/A | N/A | 40745 | 40764 | TGTATATTTATCTAAACATA | 69 | 3457 |
| | | | 40804 | 40823 | | | |
| | | | 40834 | 40853 | | | |
| | | | 40864 | 40883 | | | |
| | | | 40894 | 40913 | | | |
| | | | 40924 | 40943 | | | |
| | | | 40954 | 40973 | | | |
| | | | 40984 | 41003 | | | |
| | | | 41014 | 41033 | | | |
| 1567452 | N/A | N/A | 157636 | 157655 | CGTGTGTCATGCCAAGGCTC | 93 | 3458 |
| 1567494 | N/A | N/A | 141210 | 141229 | AAGGCATCTCTGATTCTTGC | 54 | 3459 |
| 1567503 | N/A | N/A | 30176 | 30195 | CCACACTGTTTGACCCCTGC | 25 | 3460 |
| 1567509 | N/A | N/A | 10049 | 10068 | GGTCCCTCACTGACTGTCAT | 47 | 3461 |
| 1567538 | N/A | N/A | 12181 | 12200 | TGCTAATTTTCACAGCTTAA | 64 | 3462 |
| 1567553 | N/A | N/A | 85644 | 85663 | GGTTATATCTACCAGCATCC | 42 | 3463 |
| 1567645 | N/A | N/A | 36286 | 36305 | ATTCTTATTCCCCAACATTA | 33 | 3464 |
| 1567672 | N/A | N/A | 95309 | 95328 | TGGTCTACTAGATTTATCTC | 57 | 3465 |
| 1567752 | N/A | N/A | 76297 | 76316 | CTGATCAATTTCATGTCTCA | 86 | 3466 |
| 1567771 | N/A | N/A | 51974 | 51993 | CAGGACATACTACAGCTGGC | 44 | 3467 |
| 1567803 | N/A | N/A | 56307 | 56326 | GCCTCATATCATGATGCCCC | 59 | 3468 |
| 1567805 | N/A | N/A | 100700 | 100719 | CCATGGCTACCTTCTTGACC | 48 | 3469 |
| 1567844 | N/A | N/A | 19346 | 19365 | AAGTCTTTACTTCCCATCCA | 49 | 3470 |
| 1567977 | N/A | N/A | 71158 | 71177 | GGTTCACTTACCTTCGGTCT | 26 | 3471 |
| 1568025 | N/A | N/A | 36650 | 36669 | AATTTGCATAACAATTCCTC | 41 | 3472 |
| 1568041 | N/A | N/A | 111433 | 111452 | GCACAGCTTCTGCTATTGCC | 209 | 3473 |
| 1568048 | N/A | N/A | 26155 | 26174 | ACGGATGCTTATGAAAGCCA | 26 | 3474 |
| 1568059 | N/A | N/A | 170755 | 170774 | AGGCACTGCCATTATCCCAT | 70 | 3475 |
| 1568073 | N/A | N/A | 38751 | 38770 | ATCAACTGGATTATCAGCTT | 15 | 3476 |
| 1568100 | N/A | N/A | 83731 | 83750 | GGACAGTTTTTCTAACTTCA | 15 | 3477 |
| 1568185 | N/A | N/A | 50366 | 50385 | CACTCATCATGCATTCTTCT | 27 | 3478 |
| 1568246 | N/A | N/A | 124398 | 124417 | TGTCAGGCATAGCATTCACC | 29 | 3479 |
| 1568265 | N/A | N/A | 65891 | 65910 | GCAACTACCAATGTTCCATC | 11 | 3480 |
| 1568973 | N/A | N/A | 117545 | 117564 | GTTCTCATTCAGACATTACT | 25 | 3481 |
| 1569022 | N/A | N/A | 3869 | 3888 | TAAGTCCTTCACCAGCTACC | 72 | 3482 |
| 1569036 | N/A | N/A | 46980 | 46999 | CGTTTCACTCTTGATTCTCT | 22 | 3483 |
| 1569113 | N/A | N/A | 25544 | 25563 | TCTAGCCCAGAGGCTTTCTC | 70 | 3484 |
| 1569195 | N/A | N/A | 45231 | 45250 | TCTGCACGATTTCTGACCTC | 19 | 3485 |
| 1569209 | N/A | N/A | 19217 | 19236 | ATACTTTCCCTAAGTTTGCC | 68 | 3486 |
| 1569215 | N/A | N/A | 93705 | 93724 | TGAGGTGTTCCACCATGTCA | 53 | 3487 |
| 1569247 | N/A | N/A | 37010 | 37029 | TAGGCACCATGTTATTCATA | 12 | 3488 |
| 1569339 | N/A | N/A | 120450 | 120469 | GCCTGTGGTATCACTGGGCT | 94 | 3489 |
| 1569420 | N/A | N/A | 14769 | 14788 | CACTCAGTAGCTTTTTGCCA | 29 | 3490 |
| 1569477 | N/A | N/A | 29242 | 29261 | CAGCTCTCCTTACAAGTTTA | 7 | 3491 |
| 1569569 | N/A | N/A | 81343 | 81362 | AGTGTTAACTCATATCAGGT | 12 | 3492 |
| 1569615 | N/A | N/A | 74059 | 74078 | CTGGTGTTTTAATTTTGGCA | 26 | 3493 |
| 1569778 | N/A | N/A | 165414 | 165433 | TTGCAGTATCACCTGTACTA | 44 | 3494 |
| 1569816 | N/A | N/A | 222024 | 222043 | GGTACTAATGTACCCAGCAC | 60 | 3495 |
| 1569960 | N/A | N/A | 24606 | 24625 | GTCAAGTTAACACAGAGTTA | 15 | 3496 |
| 1570237 | N/A | N/A | 113010 | 113029 | GTTCAGCCCTACTTCTGGCA | 66 | 3497 |
| 1570291 | N/A | N/A | 27623 | 27642 | TCTGATCTTAGATCCAGTAA | 67 | 3498 |
| 1570298 | N/A | N/A | 147659 | 147678 | TGCTTTCACTCCATGTGTTC | 46 | 3499 |
| 1570399 | N/A | N/A | 215288 | 215307 | GCAGTCATTGTCACTAGCCT | 82 | 3500 |
| 1570405 | N/A | N/A | 203644 | 203663 | TGTGCTTCCCAAACAGTGTA | 68 | 3501 |
| 1570535 | N/A | N/A | 167948 | 167967 | ATCTCCCTTACTGCACTTGA | 48 | 3502 |
| 1570728 | N/A | N/A | 185483 | 185502 | AGGTTCAAGCGAACTCCCAC | 74 | 3503 |
| 1570867 | N/A | N/A | 22656 | 22675 | CTGCCCAGTATTCATTCTTC | 33 | 3504 |
| 1570935 | N/A | N/A | 20975 | 20994 | GGGTTCACCTTAATGCCTCT | 35 | 3505 |

TABLE 58
Reduction of MSH3 RNA by 5-10-5 MOE modified oligonucleotides
with mixed PO/PS internucleoside linkages in A431 cells

| | SEQ ID | SEQ ID | SEQ ID | SEQ ID | | | |
|---|---|---|---|---|---|---|---|
| | No: 1 | No: 1 | No: 2 | No: 2 | | MSH3 | SEQ |
| Compound | Start | Stop | Start | Stop | | (% | ID |
| Number | Site | Site | Site | Site | Sequence (5′ to 3′) | UTC) | No. |
| 1480790 | N/A | N/A | 35860 | 35879 | TCCGCTTTTTCCTTTAGGGA | 1 | 1008 |
| 1566471 | N/A | N/A | 3867 | 3886 | AGTCCTTCACCAGCTACCCT | 68 | 3506 |
| 1566585 | N/A | N/A | 129892 | 129911 | CTCACTCTTCGCAACTCTCA | 45 | 3507 |
| 1566588 | N/A | N/A | 87102 | 87121 | GTCGACTCTAGAACGGTGCT | 72 | 3508 |
| 1566589 | N/A | N/A | 71157 | 71176 | GTTCACTTACCTTCGGTCTT | 46 | 3509 |
| 1566597 | N/A | N/A | 38511 | 38530 | GTTTGACCTACACAGCGAAA | 28 | 3510 |
| 1566603 | N/A | N/A | 10018 | 10037 | TGGCTGTGTTTACATTCTTA | 13 | 3511 |
| 1566652 | N/A | N/A | 85643 | 85662 | GTTATATCTACCAGCATCCT | 48 | 3512 |
| 1566659 | N/A | N/A | 185211 | 185230 | AGCCTAGTTTTTCCTCTCCA | 59 | 3513 |
| 1566678 | N/A | N/A | 25469 | 25488 | ACCAATCTACAAACCAAGCA | 44 | 3514 |
| 1566715 | N/A | N/A | 125789 | 125808 | TGTCTGGTCTTTTTTTGCTC | 19 | 2204 |
| 1566717 | N/A | N/A | 65745 | 65764 | GCTCTCATTAATCATCAGGA | 10 | 3515 |
| 1566770 | N/A | N/A | 203643 | 203662 | GTGCTTCCCAAACAGTGTAT | 25 | 3516 |
| 1566820 | N/A | N/A | 24469 | 24488 | GGACAGAGTTCCATTTGTGC | 17 | 3517 |
| 1566851 | N/A | N/A | 83060 | 83079 | TAGAATGTTTTTCTCCAGCC | 35 | 3518 |
| 1566950 | N/A | N/A | 100628 | 100647 | TGGTCCTCACAACACCACAA | 64 | 3519 |
| 1566992 | N/A | N/A | 50356 | 50375 | GCATTCTTCTCTAAACTTGC | 16 | 3520 |
| 1567007 | N/A | N/A | 164106 | 164125 | GTTAGGTATTCACTTAGTAC | 10 | 3521 |
| 1567016 | N/A | N/A | 35461 | 35480 | GCTCTCATTTCTTTGAACGC | 9 | 3522 |
| 1567048 | N/A | N/A | 177632 | 177651 | TCAATAAAATATTAGCAAAA | 74 | 3523 |
| | | | 205293 | 205312 | | | |
| 1567061 | N/A | N/A | 22655 | 22674 | TGCCCAGTATTCATTCTTCT | 19 | 3524 |
| 1567067 | N/A | N/A | 200478 | 200497 | CTGTCTACCACTGTTTGCCT | 83 | 3525 |
| 1567131 | N/A | N/A | 21597 | 21616 | AGGCATTTAACTCTGTCTTA | 28 | 3526 |
| 1567153 | N/A | N/A | 14768 | 14787 | ACTCAGTAGCTTTTTGCCAT | 24 | 3527 |
| 1567158 | N/A | N/A | 46653 | 46672 | TTCCAGCTTTATACACCCTT | 15 | 3528 |
| 1567190 | N/A | N/A | 141209 | 141228 | AGGCATCTCTGATTCTTGCA | 25 | 3529 |
| 1567193 | N/A | N/A | 20973 | 20992 | GTTCACCTTAATGCCTCTCA | 19 | 3530 |
| 1567242 | N/A | N/A | 19877 | 19896 | GCATGTGCAAATGACTGACA | 56 | 3531 |
| 1567258 | N/A | N/A | 165235 | 165254 | CAGCACTGTTGACCACTACT | 22 | 3532 |
| 1567304 | N/A | N/A | 76295 | 76314 | GATCAATTTCATGTCTCACC | 19 | 3533 |
| 1567309 | N/A | N/A | 117544 | 117563 | TTCTCATTCAGACATTACTA | 46 | 3534 |
| 1567386 | N/A | N/A | 170748 | 170767 | GCCATTATCCCATTCTGTGT | 72 | 3535 |
| 1567479 | N/A | N/A | 17636 | 17655 | ATGTTTTATACTTCCAAGCA | 26 | 3536 |
| 1567493 | N/A | N/A | 167945 | 167964 | TCCCTTACTGCACTTGAGCT | 72 | 3537 |
| 1567505 | N/A | N/A | 40055 | 40074 | TCTATCTATCTAAACATATA | 86 | 3538 |
| | | | 40083 | 40102 | | | |
| | | | 40111 | 40130 | | | |
| | | | 40139 | 40158 | | | |
| | | | 40239 | 40258 | | | |
| | | | 40317 | 40336 | | | |
| 1567551 | N/A | N/A | 124394 | 124413 | AGGCATAGCATTCACCATGA | 17 | 3539 |
| 1567557 | N/A | N/A | 134901 | 134920 | ATGGTCATTGCCTCAAGTCT | 58 | 3540 |
| 1567581 | N/A | N/A | 35960 | 35979 | CCACCTAGCTCTTTAATTCC | 63 | 3541 |
| 1567633 | N/A | N/A | 41994 | 42013 | CTCCATATGCCAATTCCATA | 18 | 3542 |
| 1567738 | N/A | N/A | 78198 | 78217 | GTCATATATTAATAGCTCTA | 6 | 3543 |
| 1567754 | N/A | N/A | 221661 | 221680 | GCTCTGATAGAATTTCTGGA | 23 | 3544 |
| 1567809 | N/A | N/A | 26467 | 26486 | ATGGTCCTAGTAACCAGACC | 57 | 3545 |
| 1567814 | N/A | N/A | 40743 | 40762 | TATATTTATCTAAACATATA | 90 | 3546 |
| | | | 40802 | 40821 | | | |
| | | | 40832 | 40851 | | | |
| | | | 40862 | 40881 | | | |
| | | | 40892 | 40911 | | | |
| | | | 40922 | 40941 | | | |
| | | | 40952 | 40971 | | | |
| | | | 40982 | 41001 | | | |
| | | | 41012 | 41031 | | | |
| 1567834 | N/A | N/A | 37007 | 37026 | GCACCATGTTATTCATATCT | 9 | 3547 |
| 1567846 | N/A | N/A | 61341 | 61360 | ATGTAACATGCCTCTCTGTT | 22 | 3548 |
| | | | 62022 | 62041 | | | |
| 1567858 | N/A | N/A | 180749 | 180768 | TTCAAGTGCTTTTAAAAATT | 59 | 3549 |
| | | | 182493 | 182512 | | | |
| 1567879 | N/A | N/A | 81319 | 81338 | GGTCCATTTTATCTTCCAAA | 10 | 3550 |
| 1567887 | N/A | N/A | 36277 | 36296 | CCCCAACATTAAGATTTCAA | 32 | 3551 |
| 1567950 | N/A | N/A | 27803 | 27822 | GAGTCTTTCCAACAAGGCAC | 73 | 3552 |
| 1567984 | N/A | N/A | 103576 | 103595 | TGTTATGCTTGATCCAGCAT | 79 | 3553 |
| 1567990 | N/A | N/A | 14181 | 14200 | TTAGTCTCACCTCATCTGCA | 40 | 3554 |
| 1568142 | N/A | N/A | 36647 | 36666 | TTGCATAACAATTCCTCTGA | 7 | 3555 |
| 1568155 | N/A | N/A | 215122 | 215141 | GTTCCTTGCAATCACATGCT | 24 | 3556 |
| 1568184 | N/A | N/A | 26126 | 26145 | GTTACAGGCTGCATTAGCTA | 26 | 3557 |
| 1568226 | N/A | N/A | 27585 | 27604 | GCCATGAATTGAAACTTGCA | 19 | 3558 |
| 1568279 | N/A | N/A | 35810 | 35829 | TCTAGGCAGTACACTCATCT | 56 | 3559 |
| 1568316 | N/A | N/A | 45208 | 45227 | GCTCTCTGAATCCACTTGGT | 9 | 3560 |
| 1568347 | N/A | N/A | 37158 | 37177 | TCTGCACTACATTCTGTTGC | 33 | 3561 |
| 1568364 | N/A | N/A | 19324 | 19343 | AAGCACAGACATGCTACCTC | 101 | 3562 |
| 1568435 | N/A | N/A | 19173 | 19192 | CAACCTTCTTGACTAGGGCC | 51 | 3563 |
| 1568442 | N/A | N/A | 120098 | 120117 | TTCCACATTTCATTCAAGGT | 7 | 3564 |
| 1568951 | N/A | N/A | 141856 | 141875 | AGCTCCATTTAGCTTTGACA | 53 | 3565 |
| 1569019 | N/A | N/A | 51858 | 51877 | GCCCACTCTCTGCACTTAGA | 39 | 3566 |
| 1569032 | N/A | N/A | 93704 | 93723 | GAGGTGTTCCACCATGTCAA | 53 | 3567 |
| 1569042 | N/A | N/A | 29240 | 29259 | GCTCTCCTTACAAGTTTACT | 19 | 3568 |
| 1569196 | N/A | N/A | 95307 | 95326 | GTCTACTAGATTTATCTCAA | 22 | 3569 |
| 1569212 | N/A | N/A | 157256 | 157275 | TTCCATTTCTGGCTTAGCCA | 46 | 3570 |
| 1569388 | N/A | N/A | 111246 | 111265 | CCTCAAGTATTCTTAGAAGC | 38 | 3571 |
| 1569588 | N/A | N/A | 112874 | 112893 | GGCTTATTCCTGCTTAGCTA | 50 | 3572 |
| 1569644 | N/A | N/A | 107480 | 107499 | GTCAGACTGCATATCTTTCA | 43 | 3573 |
| 1569698 | N/A | N/A | 30175 | 30194 | CACACTGTTTGACCCCTGCT | 22 | 3574 |
| 1569739 | N/A | N/A | 73916 | 73935 | CCACTCTGATGAATATGTCA | 81 | 3575 |
| 1569873 | N/A | N/A | 23702 | 23721 | CTGGATCTCTCCATAGCATA | 15 | 3576 |
| 1569894 | N/A | N/A | 92232 | 92251 | GCTTTATCTAAGCATCTTTA | 106 | 3577 |
| 1570253 | N/A | N/A | 56104 | 56123 | TTCCAAGGTCATAATCAGGA | 9 | 3578 |
| 1570303 | N/A | N/A | 108613 | 108632 | GCTTGCATTACCTTGGCTAA | 42 | 3579 |
| 1570612 | N/A | N/A | 12147 | 12166 | TCTCTGTGTTCCTCTAACAA | 44 | 3580 |
| 1570844 | N/A | N/A | 147617 | 147636 | TGGACAGTCATAATATCCCT | 62 | 3581 |
| 1570856 | N/A | N/A | 13081 | 13100 | GGTCTCATTATGTCAATTCA | 87 | 3582 |

TABLE 59
Reduction of MSH3 RNA by 5-10-5 MOE modified oligonucleotides
with mixed PO/PS internucleoside linkages in A431 cells

| | SEQ ID | SEQ ID | SEQ ID | SEQ ID | | | |
|---|---|---|---|---|---|---|---|
| | No: 1 | No: 1 | No: 2 | No: 2 | | MSH3 | SEQ |
| Compound | Start | Stop | Start | Stop | | (% | ID |
| Number | Site | Site | Site | Site | Sequence (5′ to 3′) | UTC) | No. |
| 1480790 | N/A | N/A | 35860 | 35879 | TCCGCTTTTTCCTTTAGGGA | 2 | 1008 |
| 1566461 | N/A | N/A | 129884 | 129903 | TCGCAACTCTCAATTACAGC | 18 | 3583 |
| 1566509 | N/A | N/A | 214757 | 214776 | AAGCAATATTTAGCATGGCA | 43 | 3584 |
| 1566524 | N/A | N/A | 117450 | 117469 | TAACTGTAGTTTTTCACTCT | 63 | 3585 |
| 1566546 | N/A | N/A | 100281 | 100300 | GCTTGTCCTATACAAAGACA | 108 | 3586 |
| 1566573 | N/A | N/A | 24468 | 24487 | GACAGAGTTCCATTTGTGCT | 7 | 3587 |
| 1566586 | N/A | N/A | 163879 | 163898 | ACTGATTCCACACCCTGTGA | 82 | 3588 |
| 1566611 | N/A | N/A | 82737 | 82756 | GAAGGGTCACCTCAACTCTT | 85 | 3589 |
| 1566650 | N/A | N/A | 73893 | 73912 | CCATCAACTTACTAGCTGGT | 67 | 3590 |
| 1566684 | N/A | N/A | 13072 | 13091 | ATGTCAATTCATAACCAGCA | 53 | 3591 |
| 1566704 | N/A | N/A | 26093 | 26112 | TCACCAATCCCTATGTTCAT | 35 | 3592 |
| 1566715 | N/A | N/A | 125789 | 125808 | TGTCTGGTCTTTTTTTGCTC | 12 | 2204 |
| 1566748 | N/A | N/A | 39816 | 39835 | TTTATCTATATAAACATACA | 78 | 3593 |
| | | | 39866 | 39885 | | | |
| | | | 41108 | 41127 | | | |
| 1566751 | N/A | N/A | 221424 | 221443 | AGAGCTGTTTTCACTTCATC | 18 | 3594 |
| 1566758 | N/A | N/A | 108424 | 108443 | TGCGGGATTTTACCAACGGC | 65 | 3595 |
| 1566782 | N/A | N/A | 95129 | 95148 | CCACAATGCTGCATCCCTTA | 81 | 3596 |
| 1566792 | N/A | N/A | 61339 | 61358 | GTAACATGCCTCTCTGTTGC | 62 | 3597 |
| | | | 62020 | 62039 | | | |
| 1566816 | N/A | N/A | 21588 | 21607 | ACTCTGTCTTAATTCTGACT | 41 | 3598 |
| 1566834 | N/A | N/A | 71029 | 71048 | GCAGCATCATCGACCTCCCA | 36 | 3599 |
| 1566846 | N/A | N/A | 40742 | 40761 | ATATTTATCTAAACATATAC | 91 | 3600 |
| | | | 40801 | 40820 | | | |
| | | | 40831 | 40850 | | | |
| | | | 40861 | 40880 | | | |
| | | | 40891 | 40910 | | | |
| | | | 40921 | 40940 | | | |
| | | | 40951 | 40970 | | | |
| | | | 40981 | 41000 | | | |
| | | | 41011 | 41030 | | | |
| 1566882 | N/A | N/A | 199638 | 199657 | GTGGCTTTACATATATGTCA | 87 | 3601 |
| 1566887 | N/A | N/A | 78143 | 78162 | GCATGAATATAGCACAAGGA | 4 | 3602 |
| 1566894 | N/A | N/A | 20971 | 20990 | TCACCTTAATGCCTCTCAGC | 48 | 3603 |
| 1566908 | N/A | N/A | 36643 | 36662 | ATAACAATTCCTCTGATAAT | 80 | 3604 |
| 1566982 | N/A | N/A | 92202 | 92221 | GCATACTTTCCTACCTTGGG | 21 | 3605 |
| 1567114 | N/A | N/A | 65542 | 65561 | ATAGACCTACTAGCTGGGCA | 50 | 3606 |
| 1567124 | N/A | N/A | 35459 | 35478 | TCTCATTTCTTTGAACGCAA | 1 | 3607 |
| 1567133 | N/A | N/A | 180748 | 180767 | TCAAGTGCTTTTAAAAATTA | 84 | 3608 |
| | | | 182492 | 182511 | | | |
| 1567164 | N/A | N/A | 103563 | 103582 | CCAGCATATCTAGTTATTTC | 42 | 3609 |
| 1567165 | N/A | N/A | 30090 | 30109 | AATGCAGATTTAACTTTTGA | 38 | 3610 |
| 1567243 | N/A | N/A | 19323 | 19342 | AGCACAGACATGCTACCTCA | 64 | 3611 |
| 1567251 | N/A | N/A | 25409 | 25428 | TCAGTCAGCCAAATTCCCTT | 13 | 3612 |
| 1567295 | N/A | N/A | 17634 | 17653 | GTTTTATACTTCCAAGCACA | 31 | 3613 |
| 1567303 | N/A | N/A | 203609 | 203628 | GCACAAGTTCTGCCGCTCAC | 26 | 3614 |
| 1567390 | N/A | N/A | 55117 | 55136 | ATGCACTGTACTGACTCCAC | 38 | 3615 |
| 1567424 | N/A | N/A | 156350 | 156369 | ATCCACATTTTCCTGGAGGT | 73 | 3616 |
| 1567447 | N/A | N/A | 22619 | 22638 | AGTTGCATGCCTTATCTTTC | 16 | 3617 |
| 1567560 | N/A | N/A | 93662 | 93681 | TGGGAGTGACTCACTCAGCT | 72 | 3618 |
| 1567690 | N/A | N/A | 3866 | 3885 | GTCCTTCACCAGCTACCCTT | 103 | 3619 |
| 1567756 | N/A | N/A | 141208 | 141227 | GGCATCTCTGATTCTTGCAT | 45 | 3620 |
| 1567763 | N/A | N/A | 177626 | 177645 | AAATATTAGCAAAATGAATC | 97 | 3621 |
| | | | 205287 | 205306 | | | |
| 1567782 | N/A | N/A | 165234 | 165253 | AGCACTGTTGACCACTACTT | 39 | 3622 |
| 1567862 | N/A | N/A | 51626 | 51645 | GCTTCTCTCCTTCTTCAAGC | 60 | 3623 |
| 1567888 | N/A | N/A | 76277 | 76296 | CCACAAACACTGCAACAGCT | 91 | 3624 |
| 1567951 | N/A | N/A | 35787 | 35806 | CCCTTCTATCATGCCATTCC | 37 | 3625 |
| 1567956 | N/A | N/A | 87080 | 87099 | GCTGGCATCTTTGTTTATTT | 83 | 3626 |
| 1567972 | N/A | N/A | 170199 | 170218 | GCACAGTACTTCTCTCAGGG | 10 | 3627 |
| 1568002 | N/A | N/A | 111231 | 111250 | GAAGCAGTACTTATCATTCT | 41 | 3628 |
| 1568038 | N/A | N/A | 46652 | 46671 | TCCAGCTTTATACACCCTTT | 10 | 3629 |
| 1568061 | N/A | N/A | 45183 | 45202 | GGTTCCTTCAAATACTTTTA | 16 | 3630 |
| 1568110 | N/A | N/A | 9996 | 10015 | GTTACTAATGTCTACTGTCT | 46 | 3631 |
| 1568129 | N/A | N/A | 35959 | 35978 | CACCTAGCTCTTTAATTCCT | 72 | 3632 |
| 1568149 | N/A | N/A | 134900 | 134919 | TGGTCATTGCCTCAAGTCTC | 47 | 3633 |
| 1568166 | N/A | N/A | 37006 | 37025 | CACCATGTTATTCATATCTA | 11 | 3634 |
| 1568172 | N/A | N/A | 185061 | 185080 | AGCATGGTTTTCAAGACCCT | 59 | 3635 |
| 1568243 | N/A | N/A | 37157 | 37176 | CTGCACTACATTCTGTTGCA | 85 | 3636 |
| 1568255 | N/A | N/A | 81318 | 81337 | GTCCATTTTATCTTCCAAAC | 14 | 3637 |
| 1568314 | N/A | N/A | 41987 | 42006 | TGCCAATTCCATACTAACTT | 54 | 3638 |
| 1568333 | N/A | N/A | 14178 | 14197 | GTCTCACCTCATCTGCAGGC | 66 | 3639 |
| 1568335 | N/A | N/A | 14762 | 14781 | TAGCTTTTTGCCATTCATCC | 17 | 3640 |
| 1568409 | N/A | N/A | 119829 | 119848 | GCTTTAGTATTCTAATGAGT | 21 | 3641 |
| 1568411 | N/A | N/A | 107459 | 107478 | TGACTTAGTTACTCCAAGCT | 67 | 3642 |
| 1568998 | N/A | N/A | 38252 | 38271 | GGGCAAACCACTTAAGTCAT | 94 | 3643 |
| 1569280 | N/A | N/A | 23696 | 23715 | CTCTCCATAGCATAGAGTAT | 63 | 3644 |
| 1569359 | N/A | N/A | 12136 | 12155 | CTCTAACAAGATCACATCTC | 85 | 3645 |
| 1569431 | N/A | N/A | 27583 | 27602 | CATGAATTGAAACTTGCAGC | 5 | 3646 |
| 1569509 | N/A | N/A | 141798 | 141817 | ACCCAGCTTCTATCACTCTC | 65 | 3647 |
| 1569643 | N/A | N/A | 26466 | 26485 | TGGTCCTAGTAACCAGACCA | 78 | 3648 |
| 1569679 | N/A | N/A | 29089 | 29108 | GCAAAGGTTCAAAGAACCCT | 91 | 3649 |
| 1569784 | N/A | N/A | 85638 | 85657 | ATCTACCAGCATCCTAAGGT | 78 | 3650 |
| 1570226 | N/A | N/A | 167944 | 167963 | CCCTTACTGCACTTGAGCTC | 99 | 3651 |
| 1570312 | N/A | N/A | 146731 | 146750 | CCTTCTCTATCCATTGTTTC | 75 | 3652 |
| 1570337 | N/A | N/A | 19853 | 19872 | GAAGACACTACAGAGTATGC | 66 | 3653 |
| 1570342 | N/A | N/A | 124342 | 124361 | AGGTTCCTCAACTTTTCTTC | 36 | 3654 |
| 1570345 | N/A | N/A | 36276 | 36295 | CCCAACATTAAGATTTCAAT | 20 | 3655 |
| 1570576 | N/A | N/A | 112816 | 112835 | CCTCAACATTTGCTAAGTGC | 27 | 3656 |
| 1570582 | N/A | N/A | 18821 | 18840 | GCACAATCCCAATTTAGACT | 44 | 3657 |
| 1570634 | N/A | N/A | 27802 | 27821 | AGTCTTTCCAACAAGGCACC | 74 | 3658 |
| 1570724 | N/A | N/A | 50296 | 50315 | GTGTGTTCAGGATTCATGTC | 44 | 3659 |

TABLE 60
Reduction of MSH3 RNA by 5-10-5 MOE modified oligonucleotides
with mixed PO/PS internucleoside linkages in A431 cells

| | SEQ ID | SEQ ID | SEQ ID | SEQ ID | | | |
|---|---|---|---|---|---|---|---|
| | No: 1 | No: 1 | No: 2 | No: 2 | | MSH3 | SEQ |
| Compound | Start | Stop | Start | Stop | | (% | ID |
| Number | Site | Site | Site | Site | Sequence (5′ to 3′) | UTC) | No. |
| 1480790 | N/A | N/A | 35860 | 35879 | TCCGCTTTTTCCTTTAGGGA | 2 | 1008 |
| 1566477 | N/A | N/A | 39695 | 39714 | GGGCAAATAGCTCTAAGTCT | 53 | 3660 |
| 1566500 | N/A | N/A | 14177 | 14196 | TCTCACCTCATCTGCAGGCT | 57 | 3661 |
| 1566608 | N/A | N/A | 146477 | 146496 | GCACAAATTGTCAACAGCTT | 27 | 3662 |
| 1566663 | N/A | N/A | 111228 | 111247 | GCAGTACTTATCATTCTAGT | 22 | 3663 |
| 1566767 | N/A | N/A | 3682 | 3701 | CCAGTCTTCAATGCCCTTCC | 69 | 3664 |
| 1566794 | N/A | N/A | 103560 | 103579 | GCATATCTAGTTATTTCACA | 30 | 3665 |
| 1566809 | N/A | N/A | 37143 | 37162 | GTTGCAGGCTACTCTTGACC | 12 | 3666 |
| 1566826 | N/A | N/A | 117447 | 117466 | CTGTAGTTTTTCACTCTAGA | 18 | 3667 |
| 1566836 | N/A | N/A | 14761 | 14780 | AGCTTTTTGCCATTCATCCA | 33 | 3668 |
| 1566854 | N/A | N/A | 19322 | 19341 | GCACAGACATGCTACCTCAT | 66 | 3669 |
| 1566883 | N/A | N/A | 35425 | 35444 | TGTGATGTTCACCTGATTCA | 5 | 3670 |
| 1566886 | N/A | N/A | 134242 | 134261 | GTGCAATTTTACAGACTCCT | 8 | 3671 |
| 1566888 | N/A | N/A | 129877 | 129896 | TCTCAATTACAGCCTAGGGA | 8 | 3672 |
| 1566926 | N/A | N/A | 40740 | 40759 | ATTTATCTAAACATATACAT | 65 | 3673 |
| | | | 40799 | 40818 | | | |
| | | | 40829 | 40848 | | | |
| | | | 40859 | 40878 | | | |
| | | | 40889 | 40908 | | | |
| | | | 40919 | 40938 | | | |
| | | | 40949 | 40968 | | | |
| | | | 40979 | 40998 | | | |
| | | | 41009 | 41028 | | | |
| 1566933 | N/A | N/A | 19834 | 19853 | CAGAAATGATGAACCCATCC | 62 | 3674 |
| 1567002 | N/A | N/A | 63977 | 63996 | TTGCACTTGCCCTCTGACTC | 63 | 3675 |
| 1567009 | N/A | N/A | 18719 | 18738 | CTTCCATTGAGACTTAACTT | 55 | 3676 |
| 1567019 | N/A | N/A | 73892 | 73911 | CATCAACTTACTAGCTGGTC | 52 | 3677 |
| 1567078 | N/A | N/A | 22618 | 22637 | GTTGCATGCCTTATCTTTCC | 11 | 3678 |
| 1567106 | N/A | N/A | 177622 | 177641 | ATTAGCAAAATGAATCCAAC | 70 | 3679 |
| | | | 205283 | 205302 | | | |
| 1567174 | N/A | N/A | 123408 | 123427 | GATGGCTTTTTCATTAACCA | 21 | 3680 |
| 1567269 | N/A | N/A | 163765 | 163784 | TTTTCCTTGCAACTATGGCC | 57 | 3681 |
| 1567312 | N/A | N/A | 35958 | 35977 | ACCTAGCTCTTTAATTCCTC | 64 | 3682 |
| 1567327 | N/A | N/A | 119579 | 119598 | GGGTTTTCCACCCTGCCTCC | 73 | 3683 |
| 1567349 | N/A | N/A | 78064 | 78083 | ACTCTGTTCTAGTACCACAC | 19 | 3684 |
| 1567365 | N/A | N/A | 180747 | 180766 | CAAGTGCTTTTAAAAATTAT | 74 | 3685 |
| | | | 182491 | 182510 | | | |
| 1567383 | N/A | N/A | 26092 | 26111 | CACCAATCCCTATGTTCATA | 6 | 3686 |
| 1567400 | N/A | N/A | 92089 | 92108 | GCTGGAGATAGACATGAACT | 27 | 3687 |
| 1567446 | N/A | N/A | 27570 | 27589 | TTGCAGCACAGACAAAGCAT | 57 | 3688 |
| 1567465 | N/A | N/A | 185060 | 185079 | GCATGGTTTTCAAGACCCTC | 68 | 3689 |
| 1567467 | N/A | N/A | 13071 | 13090 | TGTCAATTCATAACCAGCAT | 93 | 3690 |
| 1567477 | N/A | N/A | 108423 | 108442 | GCGGGATTTTACCAACGGCT | 52 | 3691 |
| 1567484 | N/A | N/A | 49278 | 49297 | AAGCCATGAACAATGTGTCT | 30 | 3692 |
| 1567519 | N/A | N/A | 214630 | 214649 | GGTCCATCAATAATGTGTCA | 27 | 3693 |
| 1567520 | N/A | N/A | 141207 | 141226 | GCATCTCTGATTCTTGCATA | 57 | 3694 |
| 1567529 | N/A | N/A | 46650 | 46669 | CAGCTTTATACACCCTTTCT | 22 | 3695 |
| 1567545 | N/A | N/A | 81258 | 81277 | GCACAGACAGTTATCTTGGC | 25 | 3696 |
| 1567552 | N/A | N/A | 29085 | 29104 | AGGTTCAAAGAACCCTCCTA | 83 | 3697 |
| 1567578 | N/A | N/A | 55115 | 55134 | GCACTGTACTGACTCCACTT | 12 | 3698 |
| 1567596 | N/A | N/A | 26465 | 26484 | GGTCCTAGTAACCAGACCAC | 74 | 3699 |
| 1567599 | N/A | N/A | 36995 | 37014 | TCATATCTATATGCTACCCA | 49 | 3700 |
| 1567612 | N/A | N/A | 30089 | 30108 | ATGCAGATTTAACTTTTGAC | 11 | 3701 |
| 1567621 | N/A | N/A | 35786 | 35805 | CCTTCTATCATGCCATTCCT | 28 | 3702 |
| 1567643 | N/A | N/A | 76266 | 76285 | GCAACAGCTTTCCATCTGGT | 45 | 3703 |
| 1567653 | N/A | N/A | 17619 | 17638 | GCACACTGTAAAAGACAGCA | 39 | 3704 |
| 1567731 | N/A | N/A | 221423 | 221442 | GAGCTGTTTTCACTTCATCA | 18 | 3705 |
| 1567867 | N/A | N/A | 27772 | 27791 | GCACTTAATACATCATGCCT | 27 | 3706 |
| 1567932 | N/A | N/A | 41986 | 42005 | GCCAATTCCATACTAACTTA | 11 | 3707 |
| 1567988 | N/A | N/A | 9950 | 9969 | GTGTGCTACTGCTACTATGC | 35 | 3708 |
| 1568005 | N/A | N/A | 21583 | 21602 | GTCTTAATTCTGACTTCAGC | 18 | 3709 |
| 1568032 | N/A | N/A | 51619 | 51638 | TCCTTCTTCAAGCAGACTTC | 49 | 3710 |
| 1568120 | N/A | N/A | 36640 | 36659 | ACAATTCCTCTGATAATTAT | 65 | 3711 |
| 1568150 | N/A | N/A | 70641 | 70660 | TGGTTGTGCTCACTCTTAGA | 6 | 3712 |
| 1568153 | N/A | N/A | 86944 | 86963 | GCTCAGTCCCCATAGATGGC | 73 | 3713 |
| 1568181 | N/A | N/A | 93636 | 93655 | GCCAACACATAGCGGTTCTC | 37 | 3714 |
| 1568201 | N/A | N/A | 20970 | 20989 | CACCTTAATGCCTCTCAGCT | 59 | 3715 |
| 1568305 | N/A | N/A | 107458 | 107477 | GACTTAGTTACTCCAAGCTC | 38 | 3716 |
| 1568313 | N/A | N/A | 85633 | 85652 | CCAGCATCCTAAGGTATCCA | 27 | 3717 |
| 1568375 | N/A | N/A | 95123 | 95142 | TGCTGCATCCCTTACACTGT | 69 | 3718 |
| 1568390 | N/A | N/A | 24459 | 24478 | CCATTTGTGCTTAACTTACA | 15 | 3719 |
| 1569037 | N/A | N/A | 141797 | 141816 | CCCAGCTTCTATCACTCTCT | 46 | 3720 |
| 1569060 | N/A | N/A | 203515 | 203534 | GCTGCCCCATGATCTCCATC | 33 | 3721 |
| 1569131 | N/A | N/A | 165204 | 165223 | AGCACTCTTTCCCCTCGCTC | 80 | 3722 |
| 1569136 | N/A | N/A | 169828 | 169847 | GTGCATACAACAAGGGAAGC | 45 | 3723 |
| 1569146 | N/A | N/A | 199636 | 199655 | GGCTTTACATATATGTCATC | 65 | 3724 |
| 1569258 | N/A | N/A | 112783 | 112802 | ATGTATTCACCAACCTCGGC | 39 | 3725 |
| 1569584 | N/A | N/A | 36256 | 36275 | GTTTTCTTTAAATCTGCAGC | 3 | 3726 |
| 1569852 | N/A | N/A | 37793 | 37812 | TGACACTTTTATTCTGTACC | 5 | 3727 |
| 1569881 | N/A | N/A | 100225 | 100244 | AGCTCTTCTCCCATTCCACC | 51 | 3728 |
| 1569889 | N/A | N/A | 23558 | 23577 | CTCATGACAGTTCTCACAAT | 30 | 3729 |
| 1569966 | N/A | N/A | 82734 | 82753 | GGGTCACCTCAACTCTTGGC | 64 | 3730 |
| 1570264 | N/A | N/A | 167943 | 167962 | CCTTACTGCACTTGAGCTCC | 96 | 3731 |
| 1570324 | N/A | N/A | 61325 | 61344 | TGTTGCCTACCATATTGCTT | 34 | 3732 |
| 1570478 | N/A | N/A | 155470 | 155489 | CCCACCATCACTATGACCTC | 71 | 3733 |
| 1570488 | N/A | N/A | 25408 | 25427 | CAGTCAGCCAAATTCCCTTT | 18 | 3734 |
| 1570670 | N/A | N/A | 12134 | 12153 | CTAACAAGATCACATCTCCC | 72 | 3735 |
| 1570750 | N/A | N/A | 44678 | 44697 | TGTTTCCCCACTCCTACTCT | 71 | 3736 |

TABLE 61
Reduction of MSH3 RNA by 5-10-5 MOE modified oligonucleotides
with mixed PO/PS internucleoside linkages in A431 cells

| | SEQ ID | SEQ ID | SEQ ID | SEQ ID | | | |
|---|---|---|---|---|---|---|---|
| | No: 1 | No: 1 | No: 2 | No: 2 | | MSH3 | SEQ |
| Compound | Start | Stop | Start | Stop | | (% | ID |
| Number | Site | Site | Site | Site | Sequence (5′ to 3′) | UTC) | No. |
| 1480790 | N/A | N/A | 35860 | 35879 | TCCGCTTTTTCCTTTAGGGA | 2 | 1008 |
| 1566474 | N/A | N/A | 146302 | 146321 | GAGCACCCATTCCATACCAC | 56 | 3737 |
| 1566487 | N/A | N/A | 40736 | 40755 | ATCTAAACATATACATGTGT | 58 | 3738 |
| | | | 40795 | 40814 | | | |
| | | | 40825 | 40844 | | | |
| 1566493 | N/A | N/A | 167913 | 167932 | GGGCTTTCTTGGCATACTCA | 35 | 3739 |
| | | | 169711 | 169730 | | | |
| 1566495 | N/A | N/A | 49248 | 49267 | TGGGACTCAATCTTTCCCTT | 348 | 3740 |
| 1566592 | N/A | N/A | 221340 | 221359 | ACGCTCCTCTCTTTCTTGGA | 43 | 3741 |
| 1566674 | N/A | N/A | 19721 | 19740 | CACCATGTGATTCCCTGATT | 64 | 3742 |
| 1566709 | N/A | N/A | 153293 | 153312 | GCTTGCCTGATCACTATGTT | 115 | 3743 |
| 1566715 | N/A | N/A | 125789 | 125808 | TGTCTGGTCTTTTTTTGCTC | 15 | 2204 |
| 1566740 | N/A | N/A | 92070 | 92089 | TTGCACTGCACTCTAGGTAT | 35 | 3744 |
| 1566781 | N/A | N/A | 35785 | 35804 | CTTCTATCATGCCATTCCTT | 55 | 3745 |
| 1566810 | N/A | N/A | 27771 | 27790 | CACTTAATACATCATGCCTT | 67 | 3746 |
| 1566835 | N/A | N/A | 37651 | 37670 | ACAGTTTATTTTTAGCAGCA | 4 | 3747 |
| 1566857 | N/A | N/A | 202901 | 202920 | CCTTGTTTTTCCCTCGAGGA | 71 | 3748 |
| 1566877 | N/A | N/A | 17517 | 17536 | GCACAAGGCCACATTTTCAA | 112 | 3749 |
| 1566897 | N/A | N/A | 14176 | 14195 | CTCACCTCATCTGCAGGCTA | 73 | 3750 |
| 1566909 | N/A | N/A | 141794 | 141813 | AGCTTCTATCACTCTCTTGC | 78 | 3751 |
| 1566993 | N/A | N/A | 95122 | 95141 | GCTGCATCCCTTACACTGTT | 100 | 3752 |
| 1567081 | N/A | N/A | 37142 | 37161 | TTGCAGGCTACTCTTGACCC | 22 | 3753 |
| 1567115 | N/A | N/A | 81165 | 81184 | ATAAGTTTATTTCCAGACTC | 73 | 3754 |
| 1567116 | N/A | N/A | 123406 | 123425 | TGGCTTTTTCATTAACCACC | 20 | 3755 |
| 1567163 | N/A | N/A | 41527 | 41546 | GCATATATATTTATATAAAC | 101 | 3756 |
| | | | 41557 | 41576 | | | |
| 1567181 | N/A | N/A | 85522 | 85541 | ACTCACCAACAACATCTGGC | 230 | 3757 |
| 1567188 | N/A | N/A | 39668 | 39687 | CTGTCTTACTTATTATTGGC | 3 | 3758 |
| 1567235 | N/A | N/A | 73891 | 73910 | ATCAACTTACTAGCTGGTCA | 70 | 3759 |
| 1567240 | N/A | N/A | 36993 | 37012 | ATATCTATATGCTACCCACT | 65 | 3760 |
| 1567245 | N/A | N/A | 18708 | 18727 | ACTTAACTTTGTTCCTGGCT | 69 | 3761 |
| 1567354 | N/A | N/A | 23305 | 23324 | GCTACAAGTACCAAGTAGCC | 94 | 3762 |
| 1567366 | N/A | N/A | 198886 | 198905 | ACTCGAGTAATGTTCCAGTC | 91 | 3763 |
| 1567369 | N/A | N/A | 29073 | 29092 | CCCTCCTAGACTATACTGGT | 74 | 3764 |
| 1567401 | N/A | N/A | 177621 | 177640 | TTAGCAAAATGAATCCAACA | 176 | 3765 |
| | | | 205282 | 205301 | | | |
| 1567433 | N/A | N/A | 21234 | 21253 | CCTGGCTTCAATAAGTTACT | 112 | 3766 |
| 1567459 | N/A | N/A | 82733 | 82752 | GGTCACCTCAACTCTTGGCC | 131 | 3767 |
| 1567498 | N/A | N/A | 26464 | 26483 | GTCCTAGTAACCAGACCACC | 118 | 3768 |
| 1567543 | N/A | N/A | 35957 | 35976 | CCTAGCTCTTTAATTCCTCC | 150 | 3769 |
| 1567571 | N/A | N/A | 19320 | 19339 | ACAGACATGCTACCTCATCA | 92 | 3770 |
| 1567694 | N/A | N/A | 25336 | 25355 | CTGTGTGATATGTATCACAC | 120 | 3771 |
| 1567708 | N/A | N/A | 61127 | 61146 | AGCTTACCAATTGCATGATC | 34 | 3772 |
| 1567739 | N/A | N/A | 14737 | 14756 | TATCCATGCCATCAAACAGC | 102 | 3773 |
| 1567755 | N/A | N/A | 93629 | 93648 | CATAGCGGTTCTCTTCACCA | 39 | 3774 |
| 1567826 | N/A | N/A | 46603 | 46622 | GTTGCCTGCTCATGCTGGCA | 98 | 3775 |
| 1567873 | N/A | N/A | 112328 | 112347 | GCTCACTTGAGATCCTCTAT | 63 | 3776 |
| 1567900 | N/A | N/A | 100187 | 100206 | TCGAATCTCAGATTCAGACC | 118 | 3777 |
| 1567933 | N/A | N/A | 3611 | 3630 | CTTGGGCTTTTCCTGTGGCA | 99 | 3778 |
| 1567954 | N/A | N/A | 110482 | 110501 | GAGCATCATCATATTAGCCA | 37 | 3779 |
| 1567980 | N/A | N/A | 107457 | 107476 | ACTTAGTTACTCCAAGCTCT | 71 | 3780 |
| 1568014 | N/A | N/A | 169810 | 169829 | GCAAGCTTCCTCTTTAAGGG | 127 | 3781 |
| 1568030 | N/A | N/A | 163764 | 163783 | TTTCCTTGCAACTATGGCCA | 83 | 3782 |
| 1568082 | N/A | N/A | 119532 | 119551 | ATGGAGTCTGTTCCTAGTCC | 46 | 3783 |
| 1568094 | N/A | N/A | 27565 | 27584 | GCACAGACAAAGCATCTCCA | 7 | 3784 |
| 1568158 | N/A | N/A | 51446 | 51465 | AGGCTGCTCCCACTGTTCTC | 55 | 3785 |
| 1568272 | N/A | N/A | 180745 | 180764 | AGTGCTTTTAAAAATTATGA | 132 | 3786 |
| | | | 182489 | 182508 | | | |
| 1568320 | N/A | N/A | 63975 | 63994 | GCACTTGCCCTCTGACTCCT | 47 | 3787 |
| 1568321 | N/A | N/A | 77997 | 78016 | GCCTTTCTTTGACTCTCTCC | 87 | 3788 |
| 1568325 | N/A | N/A | 9948 | 9967 | GTGCTACTGCTACTATGCAC | 126 | 3789 |
| 1568362 | N/A | N/A | 128379 | 128398 | TGGGTATGATACTTAGCCTT | 75 | 3790 |
| 1568420 | N/A | N/A | 30088 | 30107 | TGCAGATTTAACTTTTGACT | 10 | 3791 |
| 1568436 | N/A | N/A | 12133 | 12152 | TAACAAGATCACATCTCCCT | 108 | 3792 |
| 1568989 | N/A | N/A | 103310 | 103329 | CTAGAGCTCACTGAAGGTCC | 76 | 3793 |
| 1569044 | N/A | N/A | 70617 | 70636 | TACACATACCTCTCTCTGGT | 112 | 3794 |
| 1569139 | N/A | N/A | 184389 | 184408 | AGCTGTCCCTGATTCCCCTC | 69 | 3795 |
| 1569154 | N/A | N/A | 22612 | 22631 | TGCCTTATCTTTCCTAAGAT | 68 | 3796 |
| 1569211 | N/A | N/A | 214037 | 214056 | TAGCGGCACTGACTCCTCTT | 81 | 3797 |
| 1569422 | N/A | N/A | 117446 | 117465 | TGTAGTTTTTCACTCTAGAC | 25 | 3798 |
| 1569425 | N/A | N/A | 86735 | 86754 | TCCAGGCCATAACAGTTGGC | 104 | 3799 |
| 1569638 | N/A | N/A | 26091 | 26110 | ACCAATCCCTATGTTCATAT | 7 | 3800 |
| 1569837 | N/A | N/A | 76265 | 76284 | CAACAGCTTTCCATCTGGTC | 99 | 3801 |
| 1569849 | N/A | N/A | 20969 | 20988 | ACCTTAATGCCTCTCAGCTC | 62 | 3802 |
| 1569891 | N/A | N/A | 36245 | 36264 | ATCTGCAGCATACACATCTA | 47 | 3803 |
| 1570145 | N/A | N/A | 165148 | 165167 | TCTCTGGCTACACCTCCTTT | 84 | 3804 |
| 1570164 | N/A | N/A | 36632 | 36651 | TCTGATAATTATATAGTCTC | 65 | 3805 |
| 1570204 | N/A | N/A | 140240 | 140259 | GCTGGGCTTTATTCTTCATT | 76 | 3806 |
| 1570260 | N/A | N/A | 54511 | 54530 | GAGGTATTTTTTCAATAGCA | 3 | 3807 |
| 1570341 | N/A | N/A | 44672 | 44691 | CCCACTCCTACTCTAAGTAC | 144 | 3808 |
| 1570483 | N/A | N/A | 13070 | 13089 | GTCAATTCATAACCAGCATA | 99 | 3809 |
| 1570613 | N/A | N/A | 108305 | 108324 | CCACACTAGGTATAATGACC | 77 | 3810 |
| 1570658 | N/A | N/A | 35419 | 35438 | GTTCACCTGATTCACCTGAA | 3 | 3811 |
| 1570679 | N/A | N/A | 24425 | 24444 | TCTGATTGTTCTGAAGGGCC | 48 | 3812 |
| 1570775 | N/A | N/A | 133253 | 133272 | GTAGCTCAGATATTCTGTAC | 44 | 3813 |

TABLE 62
Reduction of MSH3 RNA by 5-10-5 MOE modified oligonucleotides
with mixed PO/PS internucleoside linkages in A431 cells

| | SEQ ID | SEQ ID | SEQ ID | SEQ ID | | | |
|---|---|---|---|---|---|---|---|
| | No: 1 | No: 1 | No: 2 | No: 2 | | MSH3 | SEQ |
| Compound | Start | Stop | Start | Stop | | (% | ID |
| Number | Site | Site | Site | Site | Sequence (5′ to 3′) | UTC) | No. |
| 1480790 | N/A | N/A | 35860 | 35879 | TCCGCTTTTTCCTTTAGGGA | 3 | 1008 |
| 1566566 | N/A | N/A | 13973 | 13992 | AGGGAAGGTTCTTAATGGCA | 23 | 3814 |
| 1566582 | N/A | N/A | 81162 | 81181 | AGTTTATTTCCAGACTCTGA | 30 | 3815 |
| 1566604 | N/A | N/A | 36985 | 37004 | ATGCTACCCACTGTTTGGTA | 29 | 3816 |
| 1566625 | N/A | N/A | 39665 | 39684 | TCTTACTTATTATTGGCCCT | 24 | 3817 |
| 1566658 | N/A | N/A | 146298 | 146317 | ACCCATTCCATACCACATGC | 66 | 3818 |
| 1566715 | N/A | N/A | 125789 | 125808 | TGTCTGGTCTTTTTTTGCTC | 17 | 2204 |
| 1566808 | N/A | N/A | 36243 | 36262 | CTGCAGCATACACATCTATC | 44 | 3819 |
| 1566839 | N/A | N/A | 19716 | 19735 | TGTGATTCCCTGATTTCCTC | 68 | 3820 |
| 1566849 | N/A | N/A | 49175 | 49194 | CGTACTGTTTCCCTTTGCCT | 15 | 3821 |
| 1566855 | N/A | N/A | 202688 | 202707 | TAGCATTCTAATGATCACTT | 21 | 3822 |
| 1566859 | N/A | N/A | 214034 | 214053 | CGGCACTGACTCCTCTTCTT | 49 | 3823 |
| 1566875 | N/A | N/A | 139983 | 140002 | GAATCATTTTTTGACCTTGA | 27 | 3824 |
| 1566878 | N/A | N/A | 54241 | 54260 | GCTCAGGTCTGCCTTAGCCT | 76 | 3825 |
| 1566938 | N/A | N/A | 117440 | 117459 | TTTTCACTCTAGACTTGTTT | 38 | 3826 |
| 1566949 | N/A | N/A | 35956 | 35975 | CTAGCTCTTTAATTCCTCCC | 58 | 3827 |
| 1566983 | N/A | N/A | 95120 | 95139 | TGCATCCCTTACACTGTTGT | 86 | 3828 |
| 1567027 | N/A | N/A | 23212 | 23231 | GGTACACTTCATCAGATATC | 26 | 3829 |
| 1567036 | N/A | N/A | 41486 | 41505 | TAAACATATACATGTGCATA | 64 | 3830 |
| | | | 41512 | 41531 | | | |
| 1567054 | N/A | N/A | 40735 | 40754 | TCTAAACATATACATGTGTA | 62 | 3831 |
| | | | 40794 | 40813 | | | |
| | | | 40824 | 40843 | | | |
| 1567094 | N/A | N/A | 100078 | 100097 | GCATACATACCTTCACCTGG | 45 | 3832 |
| 1567105 | N/A | N/A | 12942 | 12961 | ACACAGATGCAATTTCACTC | 37 | 3833 |
| 1567154 | N/A | N/A | 107429 | 107448 | GAGGCTTTCTCATTTGCTGC | 64 | 3834 |
| 1567189 | N/A | N/A | 169760 | 169779 | CTGCAAGCACAACTTTGACA | 72 | 3835 |
| 1567211 | N/A | N/A | 70616 | 70635 | ACACATACCTCTCTCTGGTC | 81 | 3836 |
| 1567221 | N/A | N/A | 30086 | 30105 | CAGATTTAACTTTTGACTTC | 20 | 3837 |
| 1567285 | N/A | N/A | 177617 | 177636 | CAAAATGAATCCAACAATGT | 92 | 3838 |
| | | | 205278 | 205297 | | | |
| 1567329 | N/A | N/A | 23943 | 23962 | TGGTATTTTATATCAGCCAA | 91 | 3839 |
| 1567373 | N/A | N/A | 9947 | 9966 | TGCTACTGCTACTATGCACC | 74 | 3840 |
| 1567393 | N/A | N/A | 141793 | 141812 | GCTTCTATCACTCTCTTGCT | 72 | 3841 |
| 1567398 | N/A | N/A | 14736 | 14755 | ATCCATGCCATCAAACAGCT | 68 | 3842 |
| 1567414 | N/A | N/A | 128112 | 128131 | TGCCAATATGAACACATGAC | 54 | 3843 |
| 1567448 | N/A | N/A | 77977 | 77996 | AGCAACCTTGAACCAGCACC | 95 | 3844 |
| 1567513 | N/A | N/A | 153153 | 153172 | CTCAGTGCTTTGCTTTGGCA | 54 | 3845 |
| 1567539 | N/A | N/A | 18588 | 18607 | GGTTTATTCACTAATTGACT | 33 | 3846 |
| 1567568 | N/A | N/A | 184388 | 184407 | GCTGTCCCTGATTCCCCTCC | 97 | 3847 |
| 1567638 | N/A | N/A | 35748 | 35767 | GCCTTCTACAGGAATCCATA | 47 | 3848 |
| 1567644 | N/A | N/A | 26463 | 26482 | TCCTAGTAACCAGACCACCA | 68 | 3849 |
| 1567788 | N/A | N/A | 76170 | 76189 | AGATCATTAGACTATTTTGC | 75 | 3850 |
| 1567798 | N/A | N/A | 221339 | 221358 | CGCTCCTCTCTTTCTTGGAC | 60 | 3851 |
| 1567865 | N/A | N/A | 123405 | 123424 | GGCTTTTTCATTAACCACCT | 16 | 3852 |
| 1567891 | N/A | N/A | 198706 | 198725 | GCCACATCTTTTCTTGTAGC | 105 | 3853 |
| 1567924 | N/A | N/A | 19319 | 19338 | CAGACATGCTACCTCATCAC | 115 | 3854 |
| 1567969 | N/A | N/A | 133250 | 133269 | GCTCAGATATTCTGTACGAC | 16 | 3855 |
| 1567976 | N/A | N/A | 180744 | 180763 | GTGCTTTTAAAAATTATGAT | 81 | 3856 |
| | | | 182488 | 182507 | | | |
| 1568011 | N/A | N/A | 167911 | 167930 | GCTTTCTTGGCATACTCAGT | 31 | 3857 |
| | | | 169709 | 169728 | | | |
| 1568033 | N/A | N/A | 82424 | 82443 | ATGCAATTCACCCACTTGGA | 54 | 3858 |
| 1568037 | N/A | N/A | 37141 | 37160 | TGCAGGCTACTCTTGACCCA | 32 | 3859 |
| 1568043 | N/A | N/A | 17448 | 17467 | TCCAATTCACAGCTTAGGGA | 18 | 3860 |
| 1568053 | N/A | N/A | 93627 | 93646 | TAGCGGTTCTCTTCACCATC | 45 | 3861 |
| 1568102 | N/A | N/A | 108137 | 108156 | AGCCACTGAATAAACTTGGT | 108 | 3862 |
| 1568147 | N/A | N/A | 36631 | 36650 | CTGATAATTATATAGTCTCA | 30 | 3863 |
| 1568214 | N/A | N/A | 26086 | 26105 | TCCCTATGTTCATATACTAC | 85 | 3864 |
| 1568249 | N/A | N/A | 61126 | 61145 | GCTTACCAATTGCATGATCT | 36 | 3865 |
| 1568277 | N/A | N/A | 37570 | 37589 | TTTAATCTCAAATTTTGCTT | 73 | 3866 |
| 1568382 | N/A | N/A | 44671 | 44690 | CCACTCCTACTCTAAGTACC | 93 | 3867 |
| 1568406 | N/A | N/A | 25252 | 25271 | GCAGTGATACTACAACAGCA | 62 | 3868 |
| 1569043 | N/A | N/A | 35359 | 35378 | TCGCTTTCTAAAGCTTTCCT | 59 | 3869 |
| 1569100 | N/A | N/A | 102701 | 102720 | GTCAAAGATCTATTTCCTAA | 49 | 3870 |
| 1569150 | N/A | N/A | 12128 | 12147 | AGATCACATCTCCCTGTGGC | 69 | 3871 |
| 1569217 | N/A | N/A | 27763 | 27782 | ACATCATGCCTTTAAGTCCA | 21 | 3872 |
| 1569286 | N/A | N/A | 46588 | 46607 | TGGCAGAGTAACCCAGCCAA | 115 | 3873 |
| 1569524 | N/A | N/A | 2493 | 2512 | TCGGAGGTCCTCCCGCTGCT | 97 | 3874 |
| 1569567 | N/A | N/A | 51187 | 51206 | GCCCAATGTTTCAGTCAGAA | 12 | 3875 |
| 1569733 | N/A | N/A | 110309 | 110328 | GTATGTGAATGACTTCTGCA | 21 | 3876 |
| 1569974 | N/A | N/A | 119521 | 119540 | TCCTAGTCCTTTAAGTACCT | 34 | 3877 |
| 1569975 | N/A | N/A | 29072 | 29091 | CCTCCTAGACTATACTGGTA | 82 | 3878 |
| 1570009 | N/A | N/A | 73749 | 73768 | AGGCGATCCTCCCCTACCTC | 98 | 3879 |
| 1570055 | N/A | N/A | 91872 | 91891 | TGGCTGTTTCCACTTGAGTT | 62 | 3880 |
| 1570078 | N/A | N/A | 162852 | 162871 | ACTCATATTCCTAACACGGC | 26 | 3881 |
| 1570135 | N/A | N/A | 21233 | 21252 | CTGGCTTCAATAAGTTACTT | 77 | 3882 |
| 1570165 | N/A | N/A | 63924 | 63943 | AGTGCTTCCATATATGATAT | 40 | 3883 |
| 1570171 | N/A | N/A | 27430 | 27449 | AACCTCTTCAAAAAGACTGC | 62 | 3884 |
| 1570485 | N/A | N/A | 20964 | 20983 | AATGCCTCTCAGCTCATCTA | 75 | 3885 |
| 1570560 | N/A | N/A | 112286 | 112305 | ATTGGTACATATTCCAGGGC | 25 | 3886 |
| 1570624 | N/A | N/A | 85509 | 85528 | ATCTGGCTAGAATTCATGCT | 64 | 3887 |
| 1570713 | N/A | N/A | 22611 | 22630 | GCCTTATCTTTCCTAAGATA | 53 | 3888 |
| 1570838 | N/A | N/A | 165142 | 165161 | GCTACACCTCCTTTGTTGGT | 56 | 3889 |
| 1570925 | N/A | N/A | 86699 | 86718 | AACCACAATCTAGCAGCCTT | 44 | 3890 |

TABLE 63
Reduction of MSH3 RNA by 5-10-5 MOE modified oligonucleotides
with mixed PO/PS internucleoside linkages in A431 cells

| | SEQ ID | SEQ ID | SEQ ID | SEQ ID | | | |
|---|---|---|---|---|---|---|---|
| | No: 1 | No: 1 | No: 2 | No: 2 | | MSH3 | SEQ |
| Compound | Start | Stop | Start | Stop | | (% | ID |
| Number | Site | Site | Site | Site | Sequence (5′ to 3′) | UTC) | No. |
| 1480790 | N/A | N/A | 35860 | 35879 | TCCGCTTTTTCCTTTAGGGA | 2 | 1008 |
| 1566459 | N/A | N/A | 41479 | 41498 | ATACATGTGCATATTTATAT | 86 | 3891 |
| | | | 41505 | 41524 | | | |
| 1566468 | N/A | N/A | 37566 | 37585 | ATCTCAAATTTTGCTTGGAC | 3 | 3892 |
| 1566507 | N/A | N/A | 29047 | 29066 | ATAAATTGATATTACCATTT | 84 | 3893 |
| 1566531 | N/A | N/A | 14735 | 14754 | TCCATGCCATCAAACAGCTT | 52 | 3894 |
| 1566556 | N/A | N/A | 183620 | 183639 | CCCGGTCTCATATTTTCTTC | 58 | 3895 |
| 1566622 | N/A | N/A | 19715 | 19734 | GTGATTCCCTGATTTCCTCT | 42 | 3896 |
| 1566647 | N/A | N/A | 20954 | 20973 | AGCTCATCTAAAAAGTTCCC | 72 | 3897 |
| 1566715 | N/A | N/A | 125789 | 125808 | TGTCTGGTCTTTTTTTGCTC | 22 | 2204 |
| 1566775 | N/A | N/A | 180743 | 180762 | TGCTTTTAAAAATTATGATA | 62 | 3898 |
| | | | 182487 | 182506 | | | |
| 1566802 | N/A | N/A | 36242 | 36261 | TGCAGCATACACATCTATCT | 19 | 3899 |
| 1566845 | N/A | N/A | 93626 | 93645 | AGCGGTTCTCTTCACCATCA | 20 | 3900 |
| 1566863 | N/A | N/A | 26085 | 26104 | CCCTATGTTCATATACTACT | 50 | 3901 |
| 1566913 | N/A | N/A | 61117 | 61136 | TTGCATGATCTATACCGACT | 9 | 3902 |
| 1566972 | N/A | N/A | 132356 | 132375 | GCCACATGTTGCATTGACCT | 28 | 3903 |
| 1566974 | N/A | N/A | 39382 | 39401 | TTAAGACCTTATTTTCTTTT | 76 | 3904 |
| 1567089 | N/A | N/A | 12941 | 12960 | CACAGATGCAATTTCACTCA | 32 | 3905 |
| 1567090 | N/A | N/A | 198704 | 198723 | CACATCTTTTCTTGTAGCTC | 83 | 3906 |
| 1567104 | N/A | N/A | 76056 | 76075 | AGCTCACCTAATGTTCTCCC | 52 | 3907 |
| 1567117 | N/A | N/A | 12112 | 12131 | TGGCACTCATCACAGTCTGC | 50 | 3908 |
| 1567162 | N/A | N/A | 213791 | 213810 | GGTCCATCCCTATTACTTTT | 40 | 3909 |
| 1567203 | N/A | N/A | 177616 | 177635 | AAAATGAATCCAACAATGTA | 82 | 3910 |
| | | | 205277 | 205296 | | | |
| 1567233 | N/A | N/A | 164927 | 164946 | TGCCTACTATATGATAGCTC | 75 | 3911 |
| 1567283 | N/A | N/A | 119343 | 119362 | GGAGCATAGACACATTCCAC | 58 | 3912 |
| 1567301 | N/A | N/A | 167909 | 167928 | TTTCTTGGCATACTCAGTAA | 44 | 3913 |
| | | | 169707 | 169726 | | | |
| 1567306 | N/A | N/A | 27760 | 27779 | TCATGCCTTTAAGTCCAGTT | 1 | 3914 |
| 1567316 | N/A | N/A | 86667 | 86686 | CTCAGCTCACTGCCTTTATC | 79 | 3915 |
| 1567319 | N/A | N/A | 17373 | 17392 | GTTGGCTAAATCCAACTTCT | 93 | 3916 |
| 1567335 | N/A | N/A | 9946 | 9965 | GCTACTGCTACTATGCACCC | 89 | 3917 |
| 1567367 | N/A | N/A | 202686 | 202705 | GCATTCTAATGATCACTTGC | 26 | 3918 |
| 1567451 | N/A | N/A | 40734 | 40753 | CTAAACATATACATGTGTAT | 48 | 3919 |
| | | | 40793 | 40812 | | | |
| | | | 40823 | 40842 | | | |
| 1567492 | N/A | N/A | 82179 | 82198 | GTGACTGATGTCTTTCAACT | 38 | 3920 |
| 1567495 | N/A | N/A | 146292 | 146311 | TCCATACCACATGCGGAGCT | 65 | 3921 |
| 1567586 | N/A | N/A | 128111 | 128130 | GCCAATATGAACACATGACT | 36 | 3922 |
| 1567760 | N/A | N/A | 162750 | 162769 | ATGATCTTGGTCCAATGCCT | 28 | 3923 |
| 1567800 | N/A | N/A | 13926 | 13945 | TCCAATGTAAAGCTAAGGTT | 33 | 3924 |
| 1567804 | N/A | N/A | 95118 | 95137 | CATCCCTTACACTGTTGTCC | 39 | 3925 |
| 1567823 | N/A | N/A | 139901 | 139920 | AAGCACCTCTGAGCCCTGCC | 63 | 3926 |
| 1567848 | N/A | N/A | 44667 | 44686 | TCCTACTCTAAGTACCACTC | 86 | 3927 |
| 1567863 | N/A | N/A | 23882 | 23901 | ATAATACCATAGTCATTCAT | 41 | 3928 |
| 1567868 | N/A | N/A | 70615 | 70634 | CACATACCTCTCTCTGGTCT | 62 | 3929 |
| 1567892 | N/A | N/A | 49169 | 49188 | GTTTCCCTTTGCCTTCACCT | 17 | 3930 |
| 1567945 | N/A | N/A | 2466 | 2485 | TTGGTTCGCTAAACTGCATC | 63 | 3931 |
| 1567974 | N/A | N/A | 153152 | 153171 | TCAGTGCTTTGCTTTGGCAT | 56 | 3932 |
| 1568017 | N/A | N/A | 36984 | 37003 | TGCTACCCACTGTTTGGTAT | 106 | 3933 |
| 1568023 | N/A | N/A | 19318 | 19337 | AGACATGCTACCTCATCACT | 79 | 3934 |
| 1568028 | N/A | N/A | 221338 | 221357 | GCTCCTCTCTTTCTTGGACA | 124 | 3935 |
| 1568098 | N/A | N/A | 107321 | 107340 | AGGCCTTTCTAGATTCACTA | 115 | 3936 |
| 1568125 | N/A | N/A | 123404 | 123423 | GCTTTTTCATTAACCACCTC | 33 | 3937 |
| 1568162 | N/A | N/A | 30084 | 30103 | GATTTAACTTTTGACTTCGC | 12 | 3938 |
| 1568188 | N/A | N/A | 112247 | 112266 | AGCCTATGCTAACCACTTCC | 58 | 3939 |
| 1568208 | N/A | N/A | 110176 | 110195 | GACTCATTTTTGCTATGACT | 20 | 3940 |
| 1568209 | N/A | N/A | 37140 | 37159 | GCAGGCTACTCTTGACCCAT | 38 | 3941 |
| 1568222 | N/A | N/A | 25231 | 25250 | AGCCCTTTGAATTTCAGACT | 18 | 3942 |
| 1568248 | N/A | N/A | 27428 | 27447 | CCTCTTCAAAAAGACTGCCT | 48 | 3943 |
| 1568258 | N/A | N/A | 85346 | 85365 | CTCCATATTACTCTAACCCT | 95 | 3944 |
| 1568302 | N/A | N/A | 36620 | 36639 | ATAGTCTCACAGTTATCACT | 16 | 3945 |
| 1568352 | N/A | N/A | 35955 | 35974 | TAGCTCTTTAATTCCTCCCC | 49 | 3946 |
| 1568400 | N/A | N/A | 77976 | 77995 | GCAACCTTGAACCAGCACCA | 34 | 3947 |
| 1568434 | N/A | N/A | 99953 | 99972 | GGTTATTTACAACCTCACAT | 34 | 3948 |
| 1568437 | N/A | N/A | 22518 | 22537 | GCCCAAATATCAACCCACTT | 61 | 3949 |
| 1569083 | N/A | N/A | 63921 | 63940 | GCTTCCATATATGATATGGT | 20 | 3950 |
| 1569090 | N/A | N/A | 73748 | 73767 | GGCGATCCTCCCCTACCTCA | 76 | 3951 |
| 1569444 | N/A | N/A | 26461 | 26480 | CTAGTAACCAGACCACCAGT | 111 | 3952 |
| 1569611 | N/A | N/A | 51186 | 51205 | CCCAATGTTTCAGTCAGAAC | 13 | 3953 |
| 1569614 | N/A | N/A | 21058 | 21077 | GATGAACTTGCCTTCTACTA | 56 | 3954 |
| 1569716 | N/A | N/A | 23211 | 23230 | GTACACTTCATCAGATATCC | 24 | 3955 |
| 1569863 | N/A | N/A | 54017 | 54036 | ACTGTGCAACTACCACAGGC | 73 | 3956 |
| 1569904 | N/A | N/A | 141674 | 141693 | TCCAACCTTACTCATCATCT | 48 | 3957 |
| 1569909 | N/A | N/A | 117415 | 117434 | AGCAGCTATACTCTTAACTT | 22 | 3958 |
| 1570031 | N/A | N/A | 81137 | 81156 | ATCACATTGATCACATGTCT | 68 | 3959 |
| 1570099 | N/A | N/A | 169359 | 169378 | AGTAGCTGTACTTACTGCCA | 50 | 3960 |
| 1570126 | N/A | N/A | 18580 | 18599 | CACTAATTGACTCATCCAAT | 56 | 3961 |
| 1570195 | N/A | N/A | 102621 | 102640 | GCCTAATTTCCTAAAGCAGT | 49 | 3962 |
| 1570255 | N/A | N/A | 108120 | 108139 | GGTGTCTCTCAAAATTCTGT | 35 | 3963 |
| 1570499 | N/A | N/A | 91110 | 91129 | TGTTCTTGCTGACACCCAAC | 92 | 3964 |
| 1570500 | N/A | N/A | 35747 | 35766 | CCTTCTACAGGAATCCATAC | 50 | 3965 |
| 1570557 | N/A | N/A | 35358 | 35377 | CGCTTTCTAAAGCTTTCCTC | 56 | 3966 |
| 1570877 | N/A | N/A | 46573 | 46592 | GCCAAACTAGTTTCTGCTTC | 20 | 3967 |

TABLE 64
Reduction of MSH3 RNA by 5-10-5 MOE modified oligonucleotides
with mixed PO/PS internucleoside linkages in A431 cells

| | SEQ ID | SEQ ID | SEQ ID | SEQ ID | | | |
|---|---|---|---|---|---|---|---|
| | No: 1 | No: 1 | No: 2 | No: 2 | | MSH3 | SEQ |
| Compound | Start | Stop | Start | Stop | | (% | ID |
| Number | Site | Site | Site | Site | Sequence (5′ to 3′) | UTC) | No. |
| 1480790 | N/A | N/A | 35860 | 35879 | TCCGCTTTTTCCTTTAGGGA | 1 | 1008 |
| 1566455 | N/A | N/A | 18507 | 18526 | ACATTCCAATAGAGACCCCT | 45 | 3968 |
| 1566482 | N/A | N/A | 44647 | 44666 | CCTGCATATTACATGTCAAA | 73 | 3969 |
| 1566517 | N/A | N/A | 82176 | 82195 | ACTGATGTCTTTCAACTACC | 29 | 3970 |
| 1566530 | N/A | N/A | 36617 | 36636 | GTCTCACAGTTATCACTTCA | 10 | 3971 |
| 1566644 | N/A | N/A | 202376 | 202395 | TGGCACAATTATGACTGTCA | 63 | 3972 |
| 1566692 | N/A | N/A | 19704 | 19723 | ATTTCCTCTAGAAAGCACCA | 86 | 3973 |
| 1566715 | N/A | N/A | 125789 | 125808 | TGTCTGGTCTTTTTTTGCTC | 17 | 2204 |
| 1566721 | N/A | N/A | 22510 | 22529 | ATCAACCCACTTCATCACTT | 41 | 3974 |
| 1566744 | N/A | N/A | 180705 | 180724 | AAAATTTACCATTTTAGCAT | 53 | 3975 |
| | | | 182453 | 182472 | | | |
| 1566769 | N/A | N/A | 139886 | 139905 | CTGCCCTACTCTCAGCTCTC | 57 | 3976 |
| 1566880 | N/A | N/A | 118910 | 118929 | GCTGTACTTTTTAAACCTCA | 11 | 3977 |
| 1566903 | N/A | N/A | 37555 | 37574 | TGCTTGGACTTTATTCCTGT | 3 | 3978 |
| 1566904 | 1438 | 1457 | 73470 | 73489 | ATCCATCCTTTCGACTCGAA | 9 | 3979 |
| 1566943 | N/A | N/A | 26079 | 26098 | GTTCATATACTACTGATGGA | 14 | 3980 |
| 1566977 | N/A | N/A | 198703 | 198722 | ACATCTTTTCTTGTAGCTCC | 49 | 3981 |
| 1566997 | N/A | N/A | 107263 | 107282 | CCGTCTTTTCCCTTCTCATA | 32 | 3982 |
| 1567015 | N/A | N/A | 14734 | 14753 | CCATGCCATCAAACAGCTTA | 101 | 3983 |
| 1567020 | N/A | N/A | 19317 | 19336 | GACATGCTACCTCATCACTC | 91 | 3984 |
| 1567034 | N/A | N/A | 37139 | 37158 | CAGGCTACTCTTGACCCATA | 34 | 3985 |
| 1567066 | N/A | N/A | 164926 | 164945 | GCCTACTATATGATAGCTCC | 62 | 3986 |
| 1567079 | N/A | N/A | 40689 | 40708 | CATGTGTATGTATATTTATC | 10 | 3987 |
| | | | 40723 | 40742 | | | |
| | | | 40753 | 40772 | | | |
| | | | 40782 | 40801 | | | |
| | | | 40812 | 40831 | | | |
| 1567125 | N/A | N/A | 91003 | 91022 | ATGTTAATCTCAGCTTCGGC | 32 | 3988 |
| 1567177 | N/A | N/A | 23209 | 23228 | ACACTTCATCAGATATCCTT | 38 | 3989 |
| 1567199 | N/A | N/A | 183619 | 183638 | CCGGTCTCATATTTTCTTCT | 37 | 3990 |
| 1567230 | N/A | N/A | 112246 | 112265 | GCCTATGCTAACCACTTCCC | 51 | 3991 |
| 1567238 | N/A | N/A | 93625 | 93644 | GCGGTTCTCTTCACCATCAC | 21 | 3992 |
| 1567270 | N/A | N/A | 81117 | 81136 | GTGCTTATGCCAATTCCACA | 28 | 3993 |
| 1567292 | N/A | N/A | 13858 | 13877 | GTTAAATTCCCTGATTCTGC | 30 | 3994 |
| 1567311 | N/A | N/A | 27413 | 27432 | TGCCTTCTAAAGTTCTACAT | 57 | 3995 |
| 1567338 | N/A | N/A | 54014 | 54033 | GTGCAACTACCACAGGCACA | 64 | 3996 |
| 1567442 | N/A | N/A | 169358 | 169377 | GTAGCTGTACTTACTGCCAT | 57 | 3997 |
| 1567455 | N/A | N/A | 141650 | 141669 | GTTCCTCGAATTCCTCCTGC | 36 | 3998 |
| 1567561 | N/A | N/A | 146291 | 146310 | CCATACCACATGCGGAGCTA | 35 | 3999 |
| 1567617 | N/A | N/A | 29044 | 29063 | AATTGATATTACCATTTCTA | 49 | 4000 |
| 1567851 | N/A | N/A | 177615 | 177634 | AAATGAATCCAACAATGTAT | 60 | 4001 |
| | | | 205276 | 205295 | | | |
| 1567881 | N/A | N/A | 2467 | 2486 | GTTGGTTCGCTAAACTGCAT | 68 | 4002 |
| 1567914 | N/A | N/A | 30082 | 30101 | TTTAACTTTTGACTTCGCTT | 4 | 4003 |
| 1567918 | N/A | N/A | 36235 | 36254 | TACACATCTATCTTTGAGGA | 26 | 4004 |
| 1567971 | N/A | N/A | 122886 | 122905 | CCATGTTATCAATACTAGGT | 10 | 4005 |
| 1567997 | N/A | N/A | 167906 | 167925 | CTTGGCATACTCAGTAAGAA | 17 | 4006 |
| | | | 169704 | 169723 | | | |
| 1568018 | N/A | N/A | 86590 | 86609 | GGCTGTCCAGAAATACTGCC | 80 | 4007 |
| 1568020 | N/A | N/A | 102574 | 102593 | AGGTATTACTCATTTGCTCT | 15 | 4008 |
| 1568027 | N/A | N/A | 41478 | 41497 | TACATGTGCATATTTATATA | 59 | 4009 |
| | | | 41504 | 41523 | | | |
| 1568049 | N/A | N/A | 108119 | 108138 | GTGTCTCTCAAAATTCTGTT | 22 | 4010 |
| 1568109 | N/A | N/A | 23879 | 23898 | ATACCATAGTCATTCATGTT | 25 | 4011 |
| 1568111 | N/A | N/A | 48900 | 48919 | TCCAAACTTTCTGTTCAAGC | 2 | 4012 |
| 1568113 | N/A | N/A | 110175 | 110194 | ACTCATTTTTGCTATGACTC | 22 | 4013 |
| 1568117 | N/A | N/A | 63920 | 63939 | CTTCCATATATGATATGGTT | 43 | 4014 |
| 1568146 | N/A | N/A | 99773 | 99792 | GCTGAAGTCCTTATCCCTCT | 19 | 4015 |
| 1568148 | N/A | N/A | 35723 | 35742 | TTGCTGGATTTCATAGGCCT | 46 | 4016 |
| 1568154 | N/A | N/A | 76055 | 76074 | GCTCACCTAATGTTCTCCCC | 54 | 4017 |
| 1568160 | N/A | N/A | 12939 | 12958 | CAGATGCAATTTCACTCATT | 35 | 4018 |
| 1568164 | N/A | N/A | 39250 | 39269 | ATAAACTGATCTTATATTTA | 57 | 4019 |
| 1568174 | N/A | N/A | 36972 | 36991 | TTTGGTATGCCATTCCACAT | 10 | 4020 |
| 1568186 | N/A | N/A | 26397 | 26416 | TGTATACTTTATCAAACTCT | 10 | 4021 |
| 1568192 | N/A | N/A | 70614 | 70633 | ACATACCTCTCTCTGGTCTT | 44 | 4022 |
| 1568245 | 2773 | 2792 | 161621 | 161640 | GGAGCTCTTTCCACCCATGT | 25 | 4023 |
| 1568381 | 1057 | 1076 | 20808 | 20827 | GGCAGTCAATTTCCGGGAAA | 3 | 4024 |
| 1568445 | N/A | N/A | 213790 | 213809 | GTCCATCCCTATTACTTTTC | 15 | 4025 |
| 1569007 | N/A | N/A | 132349 | 132368 | GTTGCATTGACCTAACTGCC | 49 | 4026 |
| 1569417 | N/A | N/A | 84989 | 85008 | GAGTCTACAAGACCACTGCC | 79 | 4027 |
| 1569487 | N/A | N/A | 8550 | 8569 | TACCTTGTTTACCATGACTT | 47 | 4028 |
| 1569514 | N/A | N/A | 25217 | 25236 | CAGACTAATTACCAATACTC | 29 | 4029 |
| 1569530 | N/A | N/A | 17348 | 17367 | ATTGCCACTCTGTCACTGCC | 46 | 4030 |
| 1569566 | N/A | N/A | 12086 | 12105 | GCAGTTTTTCATAAACAAGC | 41 | 4031 |
| 1569656 | N/A | N/A | 27740 | 27759 | AGGTATGCACACATCTGACT | 11 | 4032 |
| 1569917 | N/A | N/A | 46558 | 46577 | GCTTCCTAAGAAAAGCACGC | 50 | 4033 |
| 1569948 | N/A | N/A | 51154 | 51173 | GTACATTCCTAAACCTGTCA | 30 | 4034 |
| 1570119 | N/A | N/A | 35349 | 35368 | AAGCTTTCCTCTCAACCATT | 43 | 4035 |
| 1570207 | N/A | N/A | 61116 | 61135 | TGCATGATCTATACCGACTT | 6 | 4036 |
| 1570302 | N/A | N/A | 127313 | 127332 | GGTCATCTTAACTTTCAGTA | 20 | 4037 |
| 1570383 | N/A | N/A | 35929 | 35948 | TTGTATTCTTGCTCCTATTC | 24 | 4038 |
| 1570453 | N/A | N/A | 117384 | 117403 | CCCACCGTTTAATCACTGTA | 52 | 4039 |
| 1570474 | N/A | N/A | 95097 | 95116 | CAGAAAGCCATCTTGTCTGC | 71 | 4040 |
| 1570528 | N/A | N/A | 152868 | 152887 | TCATTCACTATTGCCAGGCA | 32 | 4041 |
| 1570600 | N/A | N/A | 221337 | 221356 | CTCCTCTCTTTCTTGGACAA | 44 | 4042 |
| 1570639 | N/A | N/A | 77961 | 77980 | CACCACCTCCTTGTTTCCTA | 37 | 4043 |
| 1570773 | N/A | N/A | 21053 | 21072 | ACTTGCCTTCTACTATGACA | 31 | 4044 |

TABLE 65
Reduction of MSH3 RNA by 5-10-5 MOE modified oligonucleotides
with mixed PO/PS internucleoside linkages in A431 cells

| | SEQ ID | SEQ ID | SEQ ID | SEQ ID | | | |
|---|---|---|---|---|---|---|---|
| | No: 1 | No: 1 | No: 2 | No: 2 | | MSH3 | SEQ |
| Compound | Start | Stop | Start | Stop | | (% | ID |
| Number | Site | Site | Site | Site | Sequence (5′ to 3′) | UTC) | No. |
| 1480790 | N/A | N/A | 35860 | 35879 | TCCGCTTTTTCCTTTAGGGA | 2 | 1008 |
| 1566522 | N/A | N/A | 29040 | 29059 | GATATTACCATTTCTAGCAA | 5 | 4045 |
| 1566533 | N/A | N/A | 50994 | 51013 | GCTGTTGCTTGTCTCGCTCT | 50 | 4046 |
| 1566540 | N/A | N/A | 8545 | 8564 | TGTTTACCATGACTTCCTTT | 29 | 4047 |
| 1566551 | N/A | N/A | 141635 | 141654 | CCTGCTATGCTTCACTTCCA | 99 | 4048 |
| 1566555 | N/A | N/A | 39244 | 39263 | TGATCTTATATTTAATGGCA | 11 | 4049 |
| 1566715 | N/A | N/A | 125789 | 125808 | TGTCTGGTCTTTTTTTGCTC | 17 | 2204 |
| 1566745 | N/A | N/A | 37554 | 37573 | GCTTGGACTTTATTCCTGTT | 5 | 4050 |
| 1566777 | N/A | N/A | 36971 | 36990 | TTGGTATGCCATTCCACATT | 12 | 4051 |
| 1566789 | N/A | N/A | 177614 | 177633 | AATGAATCCAACAATGTATA | 53 | 4052 |
| | | | 205275 | 205294 | | | |
| 1566804 | N/A | N/A | 30069 | 30088 | TTCGCTTAGTCCAATATGCA | 28 | 4053 |
| 1566902 | N/A | N/A | 122666 | 122685 | ATGACCTCCATAATCCATCC | 31 | 4054 |
| 1567021 | N/A | N/A | 213721 | 213740 | GCAGCATACCAATTGCGCAA | 50 | 4055 |
| 1567028 | N/A | N/A | 86589 | 86608 | GCTGTCCAGAAATACTGCCC | 62 | 4056 |
| 1567088 | N/A | N/A | 26370 | 26389 | GCCCAAGTAGACAGTCTATC | 25 | 4057 |
| 1567093 | N/A | N/A | 180704 | 180723 | AAATTTACCATTTTAGCATT | 50 | 4058 |
| | | | 182452 | 182471 | | | |
| 1567126 | N/A | N/A | 107971 | 107990 | GCCTTTTCATAATACAGAGC | 25 | 4059 |
| 1567175 | N/A | N/A | 169355 | 169374 | GCTGTACTTACTGCCATCCT | 49 | 4060 |
| 1567180 | N/A | N/A | 36616 | 36635 | TCTCACAGTTATCACTTCAT | 25 | 4061 |
| 1567257 | N/A | N/A | 102496 | 102515 | GCTTCCACTACTTGTATCTC | 31 | 4062 |
| 1567280 | N/A | N/A | 22480 | 22499 | GAGACTTGAATCCTTAACAA | 27 | 4063 |
| 1567419 | N/A | N/A | 13788 | 13807 | AGCCCATGTTCATTTGGCTT | 78 | 4064 |
| 1567462 | N/A | N/A | 117364 | 117383 | TGAGCCAATCAACACAGGCT | 62 | 4065 |
| 1567497 | N/A | N/A | 35721 | 35740 | GCTGGATTTCATAGGCCTTC | 33 | 4066 |
| 1567523 | N/A | N/A | 80652 | 80671 | CCTGATTCCATGTACTTATA | 16 | 4067 |
| 1567544 | N/A | N/A | 35927 | 35946 | GTATTCTTGCTCCTATTCCC | 10 | 4068 |
| 1567591 | N/A | N/A | 25187 | 25206 | TCCCAGGTACTGACCAGGCA | 33 | 4069 |
| 1567602 | N/A | N/A | 82175 | 82194 | CTGATGTCTTTCAACTACCA | 45 | 4070 |
| 1567606 | N/A | N/A | 107228 | 107247 | GTATTTCTTCTTCAATGGGA | 26 | 4071 |
| 1567615 | N/A | N/A | 17347 | 17366 | TTGCCACTCTGTCACTGCCA | 46 | 4072 |
| 1567657 | N/A | N/A | 40688 | 40707 | ATGTGTATGTATATTTATCT | 18 | 4073 |
| | | | 40722 | 40741 | | | |
| | | | 40752 | 40771 | | | |
| | | | 40811 | 40830 | | | |
| 1567660 | N/A | N/A | 2441 | 2460 | TGTGTCCCAGAACATGGGCA | 56 | 4074 |
| 1567677 | N/A | N/A | 41477 | 41496 | ACATGTGCATATTTATATAA | 38 | 4075 |
| | | | 41503 | 41522 | | | |
| 1567695 | N/A | N/A | 53901 | 53920 | CCTCAGTATATAATGTGACT | 38 | 4076 |
| 1567718 | N/A | N/A | 37138 | 37157 | AGGCTACTCTTGACCCATAT | 31 | 4077 |
| 1567764 | N/A | N/A | 167170 | 167189 | GCCTTCTTATTGCATAACTC | 21 | 4078 |
| 1567784 | N/A | N/A | 118797 | 118816 | AGGACCGTCTTTCCAAGACT | 53 | 4079 |
| 1567813 | N/A | N/A | 145272 | 145291 | TCTTCATGCTTACAGTCCAC | 86 | 4080 |
| 1567822 | N/A | N/A | 61110 | 61129 | ATCTATACCGACTTTAGAAA | 42 | 4081 |
| 1567827 | N/A | N/A | 26058 | 26077 | AGCCACTTCTGACAACAGCA | 21 | 4082 |
| 1567889 | N/A | N/A | 63366 | 63385 | GGTCTCCATTCAAGTCATCA | 45 | 4083 |
| 1567897 | N/A | N/A | 72683 | 72702 | ATCTGTTTCTATCACAGTCT | 57 | 4084 |
| 1567936 | N/A | N/A | 183322 | 183341 | GCCTCTGATGATCTTTGCAT | 50 | 4085 |
| 1567952 | N/A | N/A | 77956 | 77975 | CCTCCTTGTTTCCTAGTTAA | 44 | 4086 |
| 1568012 | N/A | N/A | 19315 | 19334 | CATGCTACCTCATCACTCTC | 127 | 4087 |
| 1568015 | N/A | N/A | 139840 | 139859 | GCTTGGTGTCTACCCTTTCC | 72 | 4088 |
| 1568029 | N/A | N/A | 93624 | 93643 | CGGTTCTCTTCACCATCACA | 18 | 4089 |
| 1568095 | N/A | N/A | 190455 | 190474 | TGCTATCTCCCACATCAAGC | 60 | 4090 |
| 1568126 | 1027 | 1046 | 20778 | 20797 | TCTGTTGTCTCCAATGGCCT | 52 | 4091 |
| 1568177 | N/A | N/A | 152803 | 152822 | GCTGACTGTAGACCCTAGGA | 82 | 4092 |
| 1568182 | N/A | N/A | 164925 | 164944 | CCTACTATATGATAGCTCCC | 40 | 4093 |
| 1568189 | N/A | N/A | 126187 | 126206 | TGTGCAGATTCACAGTGGCT | 68 | 4094 |
| 1568323 | N/A | N/A | 23872 | 23891 | AGTCATTCATGTTTAATTTC | 13 | 4095 |
| 1568361 | N/A | N/A | 161319 | 161338 | TGGCTTTCTCATTAAGCATT | 65 | 4096 |
| 1568964 | N/A | N/A | 44267 | 44286 | GTGTCAGCCATACAGTAGCA | 7 | 4097 |
| 1569013 | N/A | N/A | 48899 | 48918 | CCAAACTTTCTGTTCAAGCA | 5 | 4098 |
| 1569364 | N/A | N/A | 19687 | 19706 | CCATGGCTTAGATATTGCCC | 70 | 4099 |
| 1569413 | N/A | N/A | 14733 | 14752 | CATGCCATCAAACAGCTTAT | 43 | 4100 |
| 1569506 | N/A | N/A | 23208 | 23227 | CACTTCATCAGATATCCTTA | 36 | 4101 |
| 1569545 | N/A | N/A | 84988 | 85007 | AGTCTACAAGACCACTGCCA | 49 | 4102 |
| 1569755 | N/A | N/A | 202374 | 202393 | GCACAATTATGACTGTCATT | 18 | 4103 |
| 1569756 | N/A | N/A | 221335 | 221354 | CCTCTCTTTCTTGGACAACT | 29 | 4104 |
| 1569835 | N/A | N/A | 95066 | 95085 | AAGGTCTGCTTATTTCATTA | 12 | 4105 |
| 1569854 | N/A | N/A | 12037 | 12056 | TCTGGATCCCTACCATGTAC | 52 | 4106 |
| 1569941 | N/A | N/A | 99772 | 99791 | CTGAAGTCCTTATCCCTCTA | 42 | 4107 |
| 1570030 | N/A | N/A | 90988 | 91007 | TCGGCTTCTAAAATGGTGCA | 30 | 4108 |
| 1570038 | N/A | N/A | 70402 | 70421 | TGTAGGTATATCTAATGATC | 29 | 4109 |
| 1570043 | N/A | N/A | 131887 | 131906 | CCACTTGTTGCCCTCTTGCA | 67 | 4110 |
| 1570198 | N/A | N/A | 35347 | 35366 | GCTTTCCTCTCAACCATTTC | 14 | 4111 |
| 1570256 | N/A | N/A | 27738 | 27757 | GTATGCACACATCTGACTCT | 19 | 4112 |
| 1570271 | N/A | N/A | 76044 | 76063 | GTTCTCCCCATCAGTTACTC | 63 | 4113 |
| 1570289 | N/A | N/A | 12681 | 12700 | CAGGAATTAGAGTACCAGTA | 22 | 4114 |
| 1570311 | N/A | N/A | 27405 | 27424 | AAAGTTCTACATTAAGGTGA | 42 | 4115 |
| 1570406 | N/A | N/A | 46545 | 46564 | AGCACGCTCTCTCACACCTC | 32 | 4116 |
| 1570605 | N/A | N/A | 110113 | 110132 | CTCACCTTCAATATCCAAGC | 40 | 4117 |
| 1570729 | N/A | N/A | 36234 | 36253 | ACACATCTATCTTTGAGGAA | 31 | 4118 |
| 1570735 | N/A | N/A | 112013 | 112032 | TTGTTACCAGATCATTTCTA | 36 | 4119 |
| 1570799 | N/A | N/A | 18505 | 18524 | ATTCCAATAGAGACCCCTCA | 50 | 4120 |
| 1570904 | N/A | N/A | 21052 | 21071 | CTTGCCTTCTACTATGACAT | 85 | 4121 |

TABLE 66
Reduction of MSH3 RNA by 5-10-5 MOE modified oligonucleotides
with mixed PO/PS internucleoside linkages in A431 cells

| | SEQ ID | SEQ ID | SEQ ID | SEQ ID | | | |
|---|---|---|---|---|---|---|---|
| | No: 1 | No: 1 | No: 2 | No: 2 | | MSH3 | SEQ |
| Compound | Start | Stop | Start | Stop | | (% | ID |
| Number | Site | Site | Site | Site | Sequence (5′ to 3′) | UTC) | No. |
| 1480790 | N/A | N/A | 35860 | 35879 | TCCGCTTTTTCCTTTAGGGA | 2 | 1008 |
| 1566485 | N/A | N/A | 53403 | 53422 | TACCAATGCTTTCACCGTCT | 9 | 4122 |
| 1566514 | N/A | N/A | 131856 | 131875 | GCTGTCTTTGTTCTAATTAC | 34 | 4123 |
| 1566529 | N/A | N/A | 26057 | 26076 | GCCACTTCTGACAACAGCAA | 57 | 4124 |
| 1566554 | N/A | N/A | 77918 | 77937 | GCTGAGATAGCACCTATCTC | 58 | 4125 |
| 1566614 | N/A | N/A | 14732 | 14751 | ATGCCATCAAACAGCTTATC | 67 | 4126 |
| 1566621 | N/A | N/A | 70292 | 70311 | TGGCTCCCTATGCAGAACAC | 55 | 4127 |
| 1566714 | N/A | N/A | 112007 | 112026 | CCAGATCATTTCTACTCTTC | 54 | 4128 |
| 1566715 | N/A | N/A | 125789 | 125808 | TGTCTGGTCTTTTTTTGCTC | 22 | 2204 |
| 1566750 | N/A | N/A | 8056 | 8075 | ATGGACTATGCATCTCTTAC | 24 | 4129 |
| 1566793 | N/A | N/A | 149443 | 149462 | GGTGGCTTTCTTAGTAAGCC | 75 | 4130 |
| 1566797 | N/A | N/A | 19314 | 19333 | ATGCTACCTCATCACTCTCT | 50 | 4131 |
| 1566800 | N/A | N/A | 22475 | 22494 | TTGAATCCTTAACAATCCCA | 37 | 4132 |
| 1566819 | N/A | N/A | 2442 | 2461 | CTGTGTCCCAGAACATGGGC | 66 | 4133 |
| 1566848 | N/A | N/A | 213448 | 213467 | GCTCATTTTAGCCCCCATCT | 30 | 4134 |
| 1566853 | N/A | N/A | 80446 | 80465 | AGTAGCTTATATATTAAGCT | 71 | 4135 |
| 1566858 | N/A | N/A | 30068 | 30087 | TCGCTTAGTCCAATATGCAA | 47 | 4136 |
| 1566870 | N/A | N/A | 161290 | 161309 | GCCTATGTGCATATTCTCCC | 74 | 4137 |
| 1566890 | N/A | N/A | 12593 | 12612 | CCCCTACCATACTCCAAGCT | 60 | 4138 |
| 1566910 | 3002 | 3021 | 202238 | 202257 | TCCCTCTTCCTAGTTCATCC | 69 | 4139 |
| 1566914 | N/A | N/A | 167169 | 167188 | CCTTCTTATTGCATAACTCC | 37 | 4140 |
| 1566945 | N/A | N/A | 63310 | 63329 | TGGCTCTGCTCACTAGGATC | 26 | 4141 |
| 1566963 | N/A | N/A | 41476 | 41495 | CATGTGCATATTTATATAAA | 53 | 4142 |
| | | | 41502 | 41521 | | | |
| 1566969 | N/A | N/A | 144453 | 144472 | TGCACTTCACCATAGCAACA | 56 | 4143 |
| 1566985 | N/A | N/A | 86577 | 86596 | TACTGCCCAGTTGCCTCCTC | 111 | 4144 |
| 1566996 | N/A | N/A | 76037 | 76056 | CCATCAGTTACTCTGTTCCA | 60 | 4145 |
| 1567070 | N/A | N/A | 35926 | 35945 | TATTCTTGCTCCTATTCCCA | 52 | 4146 |
| 1567119 | N/A | N/A | 177613 | 177632 | ATGAATCCAACAATGTATAA | 73 | 4147 |
| | | | 205274 | 205293 | | | |
| 1567207 | N/A | N/A | 180702 | 180721 | ATTTACCATTTTAGCATTTC | 25 | 4148 |
| | | | 182450 | 182469 | | | |
| 1567224 | N/A | N/A | 21028 | 21047 | AAAGATGCTTGTTTCCAGCC | 44 | 4149 |
| 1567262 | N/A | N/A | 61104 | 61123 | ACCGACTTTAGAAACTCATA | 31 | 4150 |
| 1567277 | N/A | N/A | 37551 | 37570 | TGGACTTTATTCCTGTTAAA | 5 | 4151 |
| 1567359 | N/A | N/A | 107157 | 107176 | GGGTCATTTCTTATCCCTAC | 64 | 4152 |
| 1567372 | N/A | N/A | 93623 | 93642 | GGTTCTCTTCACCATCACAC | 19 | 4153 |
| 1567475 | N/A | N/A | 164776 | 164795 | ACTCCATTTATCTCAGCTGC | 31 | 4154 |
| 1567491 | N/A | N/A | 183314 | 183333 | TGATCTTTGCATCAAACCCC | 53 | 4155 |
| 1567527 | N/A | N/A | 169023 | 169042 | TCATGATTATCCCATCTTGC | 74 | 4156 |
| 1567562 | N/A | N/A | 72681 | 72700 | CTGTTTCTATCACAGTCTCC | 33 | 4157 |
| 1567595 | N/A | N/A | 40687 | 40706 | TGTGTATGTATATTTATCTA | 9 | 4158 |
| | | | 40721 | 40740 | | | |
| | | | 40751 | 40770 | | | |
| | | | 40810 | 40829 | | | |
| 1567600 | N/A | N/A | 27736 | 27755 | ATGCACACATCTGACTCTCA | 12 | 4159 |
| 1567641 | N/A | N/A | 18504 | 18523 | TTCCAATAGAGACCCCTCAC | 117 | 4160 |
| 1567716 | N/A | N/A | 39243 | 39262 | GATCTTATATTTAATGGCAT | 18 | 4161 |
| 1567722 | N/A | N/A | 139837 | 139856 | TGGTGTCTACCCTTTCCAAC | 110 | 4162 |
| 1567776 | N/A | N/A | 36970 | 36989 | TGGTATGCCATTCCACATTT | 6 | 4163 |
| 1567875 | N/A | N/A | 84957 | 84976 | TCATGGTATATACACAGGAC | 12 | 4164 |
| 1567883 | 3259 | 3278 | 221164 | 221183 | CCTTGCTGCAATTCCTCTAG | 64 | 4165 |
| 1567917 | N/A | N/A | 36607 | 36626 | TATCACTTCATTTTGGCACC | 4 | 4166 |
| 1567919 | N/A | N/A | 117348 | 117367 | GGCTTTGTATCATTTCATCA | 11 | 4167 |
| 1567947 | N/A | N/A | 12036 | 12055 | CTGGATCCCTACCATGTACT | 60 | 4168 |
| 1567959 | N/A | N/A | 13740 | 13759 | GCTTTCAACTGAAACCTCAA | 55 | 4169 |
| 1567985 | N/A | N/A | 126131 | 126150 | GCTTGAGTATCATCTCTGCT | 51 | 4170 |
| 1568108 | N/A | N/A | 29037 | 29056 | ATTACCATTTCTAGCAAGCA | 10 | 4171 |
| 1568170 | N/A | N/A | 26350 | 26369 | CAGTAGAATAATCATGCCAA | 45 | 4172 |
| 1568200 | N/A | N/A | 44241 | 44260 | AGGTTCATCCTTGCTGGCCA | 45 | 4173 |
| 1568206 | N/A | N/A | 110091 | 110110 | GTTTGCATACTAACTACCAC | 31 | 4174 |
| 1568215 | N/A | N/A | 107912 | 107931 | CTCTGGCTCATACTCTTGCA | 57 | 4175 |
| 1568233 | N/A | N/A | 118796 | 118815 | GGACCGTCTTTCCAAGACTT | 38 | 4176 |
| 1568274 | N/A | N/A | 95007 | 95026 | TCTTCTTTACCTCATCAGTT | 53 | 4177 |
| 1568338 | 994 | 1013 | 20745 | 20764 | TTCAGTTTGCTTCACAACTC | 44 | 4178 |
| 1568359 | N/A | N/A | 50869 | 50888 | AGCTGCTTGCCATCATGCGC | 63 | 4179 |
| 1568443 | N/A | N/A | 23207 | 23226 | ACTTCATCAGATATCCTTAT | 31 | 4180 |
| 1569039 | N/A | N/A | 36220 | 36239 | GAGGAAGCACTTATGTGTTC | 21 | 4181 |
| 1569231 | N/A | N/A | 141634 | 141653 | CTGCTATGCTTCACTTCCAA | 40 | 4182 |
| 1569238 | N/A | N/A | 82174 | 82193 | TGATGTCTTTCAACTACCAT | 90 | 4183 |
| 1569316 | N/A | N/A | 35301 | 35320 | AAGCAACCTTAACTGCAATT | 62 | 4184 |
| 1569345 | N/A | N/A | 19686 | 19705 | CATGGCTTAGATATTGCCCA | 57 | 4185 |
| 1569525 | N/A | N/A | 122665 | 122684 | TGACCTCCATAATCCATCCA | 35 | 4186 |
| 1569601 | N/A | N/A | 27342 | 27361 | GAGATCTCACCTTAGTTGCC | 36 | 4187 |
| 1569719 | N/A | N/A | 187914 | 187933 | TCAGGGACCACTCAGTGGTT | 126 | 4188 |
| 1569758 | N/A | N/A | 35714 | 35733 | TTCATAGGCCTTCACCCTTT | 52 | 4189 |
| 1569996 | N/A | N/A | 25186 | 25205 | CCCAGGTACTGACCAGGCAA | 58 | 4190 |
| 1570112 | N/A | N/A | 37117 | 37136 | TTCCTAACACTCCAGTCAAC | 79 | 4191 |
| 1570193 | N/A | N/A | 99768 | 99787 | AGTCCTTATCCCTCTACCTC | 41 | 4192 |
| 1570538 | N/A | N/A | 23829 | 23848 | AACACTTTGCCACCATGCTT | 72 | 4193 |
| 1570569 | N/A | N/A | 90932 | 90951 | GATTCCAGATGATTTCTGCC | 41 | 4194 |
| 1570604 | N/A | N/A | 48842 | 48861 | GAAGATCTTTTCTCCACACT | 39 | 4195 |
| 1570699 | N/A | N/A | 46544 | 46563 | GCACGCTCTCTCACACCTCC | 49 | 4196 |
| 1570717 | N/A | N/A | 102494 | 102513 | TTCCACTACTTGTATCTCTT | 39 | 4197 |
| 1570814 | N/A | N/A | 17346 | 17365 | TGCCACTCTGTCACTGCCAA | 72 | 4198 |

1. An oligomeric compound comprising a modified oligonucleotide, wherein the modified oligonucleotide consists of 12 to 50 linked nucleosides and has a nucleobase sequence that is at least 90% complementary to an equal length portion of a MSH3 nucleic acid, and wherein the modified oligonucleotide comprises at least one modification selected from a modified sugar moiety and a modified internucleoside linkage.

2. An oligomeric compound comprising a modified oligonucleotide, wherein the modified oligonucleotide consists of 12 to 50 linked nucleosides and has a nucleobase sequence comprising at least 8, 9, 10, 11, 12, 13, 14, 15, 16, 17, 18, 19, or 20 contiguous nucleobases of any of SEQ ID NOs: 10-4198.

3. An oligomeric compound comprising a modified oligonucleotide, wherein the modified oligonucleotide consists of 12 to 50 linked nucleosides and has a nucleobase sequence comprising at least 8, 9, 10, 11, 12, 13, 14, 15, 16, 17, 18, 19, or 20 contiguous nucleobases of any of SEQ ID NOs: 10-2196.

4. An oligomeric compound comprising a modified oligonucleotide, wherein the modified oligonucleotide consists of 12 to 50 linked nucleosides and has a nucleobase sequence comprising at least 8, 9, 10, 11, 12, 13, 14, 15, 16, 17, 18, 19, or 20 contiguous nucleobases of any of SEQ ID NOs: 88, 91, 92, 97, 98, 100, 101, 103, 105, 107, 109, 111, 114, 116, 119, 120, 121, 124, 168, 169, 170, 172, 179, 180, 184, 188, 191, 195, 196, 197, 201, 242, 245, 246, 249, 250, 252, 253, 254, 255, 257, 261, 262, 268, 269, 270, 272, 273, 274, 319, 321, 322, 324, 325, 326, 327, 328, 329, 333, 334, 336, 338, 345, 349, 350, 354, 362, 365, 384, 387, 392, 405, 406, 408, 421, 425, 432, 434, 435, 441, 444, 451, 461, 462, 463, 468, 469, 472, 484, 487, 488, 493, 494, 500, 503, 507, 508, 511, 515, 517, 518, 531, 533, 534, 543, 556, 557, 558, 559, 563, 569, 578, 587, 596, 600, 604, 609, 612, 614, 615, 616, 628, 631, 633, 638, 642, 645, 648, 651, 652, 658, 659, 667, 671, 678, 679, 680, 683, 689, 690, 697, 699, 700, 708, 712, 715, 717, 723, 724, 730, 735, 739, 740, 744, 746, 749, 750, 753, 755, 758, 763, 764, 769, 770, 771, 772, 773, 776, 781, 789, 792, 794, 795, 798, 805, 808, 809, 813, 816, 817, 818, 825, 833, 835, 836, 837, 844, 845, 848, 849, 850, 852, 853, 859, 865, 887, 895, 896, 901, 906, 909, 912, 914, 927, 930, 940, 943, 946, 952, 959, 961, 962, 963, 969, 971, 980, 981, 994, 1000, 1001, 1005, 1008, 1014, 1015, 1017, 1024, 1033, 1038, 1044, 1050, 1051, 1056, 1061, 1066, 1068, 1070, 1072, 1080, 1083, 1085, 1091, 1092, 1094, 1096, 1097, 1104, 1115, 1119, 1125, 1128, 1130, 1133, 1140, 1147, 1150, 1153, 1156, 1161, 1169, 1170, 1174, 1178, 1179, 1180, 1184, 1186, 1199, 1201, 1206, 1208, 1213, 1217, 1222, 1226, 1229, 1231, 1240, 1245, 1248, 1250, 1255, 1258, 1261, 1262, 1264, 1271, 1273, 1283, 1287, 1289, 1295, 1296, 1299, 1309, 1311, 1313, 1314, 1316, 1322, 1324, 1325, 1326, 1331, 1332, 1333, 1342, 1346, 1348, 1353, 1355, 1357, 1359, 1376, 1377, 1378, 1379, 1390, 1393, 1397, 1399, 1401, 1405, 1409, 1413, 1417, 1420, 1421, 1422, 1436, 1437, 1451, 1453, 1459, 1462, 1468, 1476, 1479, 1483, 1488, 1490, 1492, 1494, 1508, 1512, 1520, 1521, 1524, 1529, 1532, 1535, 1538, 1545, 1547, 1548, 1549, 1554, 1557, 1558, 1567, 1585, 1595, 1596, 1605, 1606, 1620, 1622, 1623, 1626, 1628, 1630, 1636, 1637, 1641, 1653, 1656, 1657, 1658, 1664, 1671, 1672, 1675, 1676, 1678, 1679, 1680, 1691, 1694, 1695, 1696, 1697, 1700, 1702, 1705, 1706, 1712, 1716, 1718, 1719, 1722, 1724, 1732, 1735, 1737, 1751, 1757, 1759, 1765, 1773, 1774, 1779, 1786, 1796, 1800, 1805, 1806, 1807, 1811, 1813, 1816, 1818, 1821, 1824, 1826, 1827, 1832, 1836, 1840, 1842, 1846, 1852, 1854, 1857, 1862, 1864, 1874, 1878, 1886, 1888, 1890, 1892, 1893, 1902, 1903, 1911, 1915, 1924, 1926, 1930, 1933, 1939, 1941, 1951, 1953, 1955, 1959, 1962, 1973, 1974, 1976, 1977, 1982, 1987, 1989, 1990, 1994, 2001, 2003, 2007, 2011, 2013, 2015, 2019, 2038, 2039, 2043, 2065, 2067, 2073, 2099, 2100, 2103, 2105, 2112, 2117, 2123, 2125, 2129, 2130, 2146, 2159, 2161, 2164, 2171, 2173, 2177, 2183, 2185, 2187, and 2195.

5. An oligomeric compound comprising a modified oligonucleotide, wherein the modified oligonucleotide consists of 12 to 50 linked nucleosides and has a nucleobase sequence comprising at least 8, 9, 10, 11, 12, 13, 14, 15, 16, 17, 18, 19, or 20 contiguous nucleobases of any of SEQ ID NOs: 10-355.

6. The oligomeric compound of claim 5, wherein the nucleobase sequence comprising at least 8, 9, 10, 11, 12, 13, 14, 15, 16, 17, 18, 19, or 20 contiguous nucleobases of any of SEQ ID NOs: 51, 53, 54, 56, 59, 63, 65, 88, 91, 92, 97, 98, 101, 107, 129, 130, 131, 132, 134, 142, 168, 169, 172, 180, 203, 205, 206, 208, 209, 210, 212, 217, 242, 245, 246, 250, 252, 257, 261, 269, 283, 284, 285, 286, 287, 292, 293, 294, 295, 304, 310, 319, 321, 322, and 324.

7. The oligomeric compound of claim 3, wherein the nucleobase sequence comprising at least 8, 9, 10, 11, 12, 13, 14, 15, 16, 17, 18, 19, or 20 contiguous nucleobases of any of SEQ ID NOs: 53, 59, 212, 283, 56, 134, 168, 206, 246, 91, 132, 319, 324, 98, 250, 287, 293, 321, 54, 63, 131, 205, 208, 252, 285, 286, 322, 209, 129, 130, 242, 97, 261, 269, 284, 304, 310, 65, 88, 101, 172, 180, 210, 217, 292, 294, 92, 169, 245, 257, 295, 107, 203, 255, 327, 328, 329, 48, 66, 111, 142, 51, 299, 336, 127, 272, 280, 345, 350, 51, 80, 143, 215, 218, 226, 240, 249, 268, 279, 288, 296, 325, 50, 197, 253, 297, 133, 157, 191, 270, 109, 51, 162, 188, 70, 124, 254, 69, 120, 220, 233, 273, 334, 49, 67, 76, 84, 140, 170, 103, 114, 289, 306, 55, 116, 141, 184, 262, 274, 51, 75, 156, 201, 235, 239, 81, 86, 195, 196, 234, 317, 349, 19, 105, 119, 147, 211, 227, 28, 100, 238, 241, 128, 303, 315, 326, 312, 338, 42, 121, 179, 333, 354, 160, 216, 300, 79, 224, 277, 115, 185, 256, 15, 57, 161, 163, 173, 243, 164, 193, 222, 82, 183, 186, 187, 189, 68, 146, 221, 43, 85, 104, 199, 278, 313, 175, 176, 223, 259, 32, 37, 166, 352, 276, 83, 36, 74, 200, 204, 346, 93, 136, 152, 123, 159, 265, 26, 149, 165, 167, 178, 244, 20, 58, 96, 102, 151, 231, 331, 347, 41, 44, 314, 318, 339, 27, 192, 266, 298, 23, 33, 45, 181, 232, 311, 355, 22, 25, 139, 236, 89, 108, 282, 35, 260, 30, 39, 117, 144, 148, 158, 267, 305, 342, 154, 335, 52, 258, 264, 275, 302, 309, 21, 237, 340, 12, 110, 112, and 337.

8. An oligomeric compound comprising a modified oligonucleotide consisting of 12 to 30 linked nucleosides and having a nucleobase sequence comprising at least 8, at least 9, at least 10, at least 11, at least 12, at least 13, at least 14, at least 15, at least 16, at least 17, at least 18, at least 19, or at least 20 contiguous nucleobases complementary to:
an equal length portion of nucleobases 4438-4475 of SEQ ID NO: 2;
an equal length portion of nucleobases 13141-13213 of SEQ ID NO: 2;
an equal length portion of nucleobases 18114-18146 of SEQ ID NO: 2;
an equal length portion of nucleobases 18178-18202 of SEQ ID NO: 2;
an equal length portion of nucleobases 18245-18290 of SEQ ID NO: 2;
an equal length portion of nucleobases 20249-20330 of SEQ ID NO: 2;
an equal length portion of nucleobases 23001-23061 of SEQ ID NO: 2;
an equal length portion of nucleobases 35859-35907 of SEQ ID NO: 2;
an equal length portion of nucleobases 36200-36315 of SEQ ID NO: 2;
an equal length portion of nucleobases 37000-37041 of SEQ ID NO: 2;
an equal length portion of nucleobases 73448-73497 of SEQ ID NO: 2;
an equal length portion of nucleobases 76851-76900 of SEQ ID NO: 2;
an equal length portion of nucleobases 89462-89531 of SEQ ID NO: 2;
an equal length portion of nucleobases 92554-92591 of SEQ ID NO: 2;
an equal length portion of nucleobases 109563-109628 of SEQ ID NO: 2;
an equal length portion of nucleobases 116894-116937 of SEQ ID NO: 2
an equal length portion of nucleobases 116894-116951 of SEQ ID NO: 2;
an equal length portion of nucleobases 118292-118317 of SEQ ID NO: 2;
an equal length portion of nucleobases 122127-122161 of SEQ ID NO: 2;
an equal length portion of nucleobases 180800-180823 of SEQ ID NO: 2; or
an equal length portion of nucleobases 224684-224713 of SEQ ID NO: 2.

9. An oligomeric compound comprising a modified oligonucleotide consisting of 12 to 30 linked nucleosides and having a nucleobase sequence comprising at least 8, at least 9, at least 10, at least 11, at least 12, at least 13, at least 14, at least 15, at least 16, at least 17, at least 18, at least 19, or at least 20 contiguous nucleobases complementary to:
an equal length portion of nucleobases 18178-18202 of SEQ ID NO: 2;
an equal length portion of nucleobases 18245-18290 of SEQ ID NO: 2;
an equal length portion of nucleobases 73448-73497 of SEQ ID NO: 2;
an equal length portion of nucleobases 92554-92591 of SEQ ID NO: 2;
an equal length portion of nucleobases 109563-109628 of SEQ ID NO: 2;
an equal length portion of nucleobases 116894-116937 of SEQ ID NO: 2;
an equal length portion of nucleobases 118292-118316 of SEQ ID NO: 2;
an equal length portion of nucleobases 122127-122161 of SEQ ID NO: 2;
an equal length portion of nucleobases 180800-180823 of SEQ ID NO: 2; or
an equal length portion of nucleobases 224684-224713 of SEQ ID NO: 2.

10. An oligomeric compound comprising a modified oligonucleotide consisting of 12 to 30 linked nucleosides and having a nucleobase sequence comprising at least 8, at least 9, at least 10, at least 11, at least 12, at least 13, at least 14, at least 15, at least 16, at least 17, or at least 18 contiguous nucleobases of a sequence selected from:
SEQ ID NOs: 19, 203, 422, 478, 583, 603, 706, 1992, 2074, and 2143;
SEQ ID NOs: 28, 280, 369, 487, 553, 1102, 1168, 1244, 1300, 1416, 1444, 1522, 1645, 1688, 1753, 1887, 1961, 2018, 2120, 3399, and 3430;
SEQ ID NOs: 129, 206, 450, 577, 611, 688, 801, 820, 900, and 3124;
SEQ ID NOs: 53, 283, 381, 433, 1906, 2033, 2115, and 2156;
SEQ ID NOs: 1159, 1272, 1290, 1374, 1472, 1550, and 1610;
SEQ ID NOs: 37, 54, 55, 56, 131, 132, 133, 208, 209, 210, 284, 285, 286, 287, 1176, 1266, 1301, 1385, 1457, 1533, 1594, 1715, 1799, and 2216;
SEQ ID NOs: 59, 212, 289, 361, 1145, 1242, 1284, 1423, 1495, 1513, 1638, 1731, 1740, 1823, 1935, 1999, 2054, 2148, 2748, 2817, 2920, and 3015;
SEQ ID NOs: 1008, 1096, 2857, 2901, 2983, 3044, 3131, 3255, and 3292;
SEQ ID NOs: 1953, 2015, 2067, 2171, 2230, 2815, 2948, 3006, 3092, 3129, 3245, 3307, 3353, 3464, 3551, 3655, 3726, 3803, 3819, 3899, 4004, 4118, and 4181;
SEQ ID NOs: 1331, 1405, 3346, 3357, 3488, 3547, and 3634;
SEQ ID NOs: 62, 139, 215, 216, 292, 356, 506, 560, 650, 673, 774, 831, 918, 1040, 1105, 1197, 1256, 1282, 1428, 1469, 1570, 1657, 2141, and 3979;
SEQ ID NOs: 63, 1076, 1148, 1260, 1312, 1386, 1440, 1541, 1634, 1674, 1797, 1834, and 1898;
SEQ ID NOs: 217, 294, 429, 481, 562, 636, 738, 761, 878, 940, 2059, 2167, 2487, and 2507;
SEQ ID NOs: 65, 218, 295, 526, 619, 694, 766, 862, 945, 978, 1084, 1172, 1276, 1321, and 1395;
SEQ ID NOs: 66, 296, 377, 627, 701, 760, 815, 919, 1028, 1095, 1151, 1243, 1323, 1354, 1496, 1575, 1646, 1666, 1789, 1828, 1907, 1969, 2093, 2192, and 2611;
SEQ ID NOs: 69, 222, 299, 412, 1621, 1687, 1792, 1819, 1932, 2006, 2094, and 2135;
SEQ ID NOs: 69, 222, 299, 412, 1361, 1448, 1563, 1621, 1687, 1792, 1819, 1932, 2006, 2094, and 2135;
SEQ ID NOs: 744, 837, 943, 971, 1068, and 2690;
SEQ ID NOs: 699, 764, 850, 906, 1017, 1050, 2784, and 2832;
SEQ ID NOs: 119, 120, 196, 197, 273, and 350;
SEQ ID NOs: 399, 449, 1704, 1812, 1838, 1957, 1986, 2069, and 2175.

11. An oligomeric compound comprising a modified oligonucleotide consisting of 12 to 30 linked nucleosides and having a nucleobase sequence comprising at least 8, at least 9, at least 10, at least 11, at least 12, at least 13, at least 14, at least 15, at least 16, at least 17, or at least 18 contiguous nucleobases of a sequence selected from:
SEQ ID NOs: 53, 283, 381, 433, 1906, 2033, 2115, and 2156;
SEQ ID NOs: 1159, 1272, 1290, 1374, 1472, 1550, and 1610;
SEQ ID NOs: 62, 139, 215, 216, 292, 356, 506, 560, 650, 673, 774, 831, 918, 1040, 1105, 1197, 1256, 1282, 1428, 1469, 1570, 1657, and 2141;
SEQ ID NOs: 65, 218, 295, 526, 619, 694, 766, 862, 945, 978, 1084, 1172, 1276, 1321, and 1395;
SEQ ID NOs: 66, 296, 377, 627, 701, 760, 815, 919, 1028, 1095, 1151, 1243, 1323, 1354, 1496, 1575, 1646, 1666, 1789, 1828, 1907, 1969, 2093, and 2192;
SEQ ID NOs: 69, 222, 299, 412, 1621, 1687, 1792, 1819, 1932, 2006, 2094, and 2135;
SEQ ID NOs: 744, 837, 943, 971, and 1068;
SEQ ID NOs: 699, 764, 850, 906, 1017, and 1050;
SEQ ID NOs: 119, 120, 196, 197, 273, and 350; or
SEQ ID NOs: 399, 449, 1704, 1812, 1838, 1957, 1986, 2069, and 2175.

12. The oligomeric compound of any one of claims 1-11, wherein the modified oligonucleotide has a nucleobase sequence that is at least 80%, 85%, 90%, 95%, or 100% complementary to an equal length portion of a nucleobase sequence selected from SEQ ID NOs: 1-3 when measured across the entire nucleobase sequence of the modified oligonucleotide.

13. The oligomeric compound of any one of claims 1-12, wherein at least one modified nucleoside comprises a modified sugar moiety.

14. The oligomeric compound of claim 13, wherein the modified sugar moiety comprises a bicyclic sugar moiety.

15. The oligomeric compound of claim 14, wherein the bicyclic sugar moiety comprises a 2′-4′ bridge selected from —O—CH₂—; and —O—CH(CH₃)—.

16. The oligomeric compound of claim 13, wherein the modified sugar moiety comprises a non-bicyclic modified sugar moiety.

17. The oligomeric compound of claim 16, wherein the non-bicyclic modified sugar moiety comprises a 2′-MOE sugar moiety or 2′-OMe sugar moiety.

18. The oligomeric compound of any one of claims 1-12, wherein at least one modified nucleoside comprises a sugar surrogate.

19. The oligomeric compound of claim 18, wherein the sugar surrogate is selected from morpholino and PNA.

20. The oligomeric compound of any of claims 1-19, wherein the modified oligonucleotide has a sugar motif comprising:
a 5′-region consisting of 1-5 linked 5′-region nucleosides;
a central region consisting of 6-10 linked central region nucleosides; and
a 3′-region consisting of 1-5 linked 3′-region nucleosides; wherein
each of the 5′-region nucleosides and each of the 3′-region nucleosides comprises a modified sugar moiety and each of the central region nucleosides comprises an unmodified 2′-deoxyribosyl sugar moiety.

21. The oligomeric compound of claim 20, wherein the 5′ region consists of 5 linked 5′-region nucleosides; the central region consists of 10 linked central region nucleosides; and the 3′-region consists of 5 linked 3′-region nucleosides; wherein each of the nucleosides of the 5′-region and each of the nucleosides of the 3′-region comprises a 2′-MOE sugar moiety and each of the nucleosides of the central region comprises an unmodified 2′-deoxyribosyl sugar moiety.

22. The oligomeric compound of claim 20, wherein the 5′ region consists of 3 linked 5′-region nucleosides; the central region consists of 10 linked central region nucleosides; and the 3′-region consists of 3 linked 3′-region nucleosides; wherein each of the nucleosides of the 5′-region and each of the nucleosides of the 3′-region comprises a cEt modified sugar moiety and each of the nucleosides of the central region comprises an unmodified 2′-deoxyribosyl sugar moiety.

23. The oligomeric compound of any one of claims 1-22, wherein the modified oligonucleotide comprises at least one modified internucleoside linkage.

24. The oligomeric compound of claim 23, wherein each internucleoside linkage of the modified oligonucleotide is a modified internucleoside linkage.

25. The oligomeric compound of claim 23 or 24 wherein the modified internucleoside linkage is a phosphorothioate internucleoside linkage.

26. The oligomeric compound of claim 23 or 25 wherein the modified oligonucleotide comprises at least one phosphodiester internucleoside linkage.

27. The oligomeric compound of any of claim 23, 25, or 26, wherein each internucleoside linkage is independently selected from a phosphodiester internucleoside linkage or a phosphorothioate internucleoside linkage.

28. The oligomeric compound of any of claims 1-27, wherein the modified oligonucleotide comprises at least one modified nucleobase.

29. The oligomeric compound of claim 28, wherein the modified nucleobase is a 5-methyl cytosine.

30. The oligomeric compound of any of claims 1-29, wherein the modified oligonucleotide consists of 12-30, 12-22, 12-20, 14-20, 15-25, 16-20, 18-22 or 18-20 linked nucleosides.

31. The oligomeric compound of any of claims 1-30, wherein the modified oligonucleotide consists of 20 linked nucleosides.

32. The oligomeric compound of any of claims 1-31, consisting of the modified oligonucleotide.

33. The oligomeric compound of any of claims 1-32, comprising a conjugate group comprising a conjugate moiety and a conjugate linker.

34. The oligomeric compound of claim 33, wherein the conjugate group comprises a GalNAc cluster comprising 1-3 GalNAc ligands.

35. The oligomeric compound of claim 33 or 34, wherein the conjugate linker consists of a single bond.

36. The oligomeric compound of claim 33, wherein the conjugate linker is cleavable.

37. The oligomeric compound of claim 36, wherein the conjugate linker comprises 1-3 linker-nucleosides.

38. The oligomeric compound of any of claims 33-37, wherein the conjugate group is attached to the modified oligonucleotide at the 5′-end of the modified oligonucleotide.

39. The oligomeric compound of any of claims 33-37, wherein the conjugate group is attached to the modified oligonucleotide at the 3′-end of the modified oligonucleotide.

40. The oligomeric compound of any of claims 1-38, comprising a terminal group.

41. The oligomeric compound of any of claims 1-40, wherein the oligomeric compound is a singled-stranded oligomeric compound.

42. The oligomeric compound of any of claim 1-36 or 38-41, wherein the oligomeric compound does not comprise linker-nucleosides.

43. The oligomeric compound of any one of claims 1-42, wherein the modified oligonucleotide of the oligomeric compound is a salt, and wherein the salt is a sodium salt or a potassium salt.

44. An oligomeric duplex comprising an oligomeric compound of any of claim 1-40 or 42-43.

45. An antisense compound comprising or consisting of an oligomeric compound of any of claims 1-43 or an oligomeric duplex of claim 44.

46. A pharmaceutical composition comprising an oligomeric compound of any of claims 1-43, an oligomeric duplex of claim 44, or an antisense compound of claim 45 and a pharmaceutically acceptable carrier or diluent.

47. The pharmaceutical composition of claim 46, wherein the pharmaceutically acceptable diluent is artificial cerebrospinal fluid or phosphate buffered saline (PBS).

48. The pharmaceutical composition of claim 47, wherein the pharmaceutical composition consists essentially of the modified oligonucleotide and artificial cerebrospinal fluid or PBS.

49. A method comprising administering to a subject a pharmaceutical composition of any of claims 46-48.

50. A method of treating a repeat expansion disease comprising administering to an individual having, or at risk for developing, the repeat expansion disease a therapeutically effective amount of a pharmaceutical composition according to any of claims 46-48, thereby treating the repeat expansion disease.

51. A method of reducing MSH3 RNA or MSH3 protein in a subject having or at risk for developing a repeat expansion disease comprising administering a therapeutically effective amount of a pharmaceutical composition according to any of claims 46-48, thereby reducing MSH3 RNA or MSH3 protein in the subject.

52. A method of reducing MSH3 RNA or MSH3 protein in the central nervous system of a subject having or at risk for developing a repeat expansion disease comprising administering a therapeutically effective amount of a pharmaceutical composition according to any of claims 46-48, thereby reducing MSH3 RNA or MSH3 protein in the central nervous system.

53. The method of any one of claims 50-52, wherein the repeat expansion disease is myotonic dystrophy.

54. The method of claim 53, wherein the myotonic dystrophy is type 1 myotonic dystrophy.

55. The method of claim 53, wherein the myotonic dystrophy is type 2 myotonic dystrophy.

56. The method of any one of claims 50-52, wherein the repeat expansion disease is amyotrophic lateral sclerosis.

57. The method of any one of claims 50-52, wherein the repeat expansion disease is frontotemporal dementia.

58. The method of any one of claims 50-52, wherein the repeat expansion disease is Huntington's disease.

59. The method of any one of claims 50-52, wherein the repeat expansion disease is a polyglutamine disorder.

60. The method of any one of claims 50-52, wherein the repeat expansion disease is a spinocerebellar ataxia.

61. The method of any one of claims 50-52, wherein the repeat expansion disease is Friedreich's ataxia.

62. The method of any one of claims 50-52, wherein the repeat expansion disease is Fragile X syndrome.

63. The method of any of claims 49-62, wherein the administering is by intrathecal administration.

64. The method of any of claims 49-62, wherein at least one symptom or hallmark of the repeat expansion disease is ameliorated.

65. The method of claim 64, wherein the at least one symptom or hallmark is selected from brain atrophy, muscle atrophy, nerve degeneration, uncontrolled movement, seizure, tremors, muscle weakness, muscle cramping, difficulty swallowing, difficulty speaking, decreased memory, decreased cognition, anxiety, depression, and combinations thereof.

66. The method of any of claims 49-65, wherein the method prevents or slows disease regression.

67. A method of reducing MSH3 RNA in a cell comprising contacting the cell with an oligomeric compound according to any of claims 1-43, an oligomeric duplex according to claim 44, or an antisense compound according to claim 45; and thereby reducing MSH3 RNA in the cell.

68. A method of reducing MSH3 protein in a cell comprising contacting the cell with an oligomeric compound according to any of claims 1-43, an oligomeric duplex according to claim 44, or an antisense compound according to claim 45; and thereby reducing MSH3 protein in the cell.

69. A method of preventing or slowing an expansion of a repeat region in a cell, the method comprising contacting the cell with an oligomeric compound according to any of claims 1-43, an oligomeric duplex according to claim 44, or an antisense compound according to claim 45.

70. A method of reducing the number of repeats in a repeat region in a cell, the method comprising contacting the cell with an oligomeric compound according to any of claims 1-43, an oligomeric duplex according to claim 44, or an antisense compound according to claim 45.

The application's sequence listing, which the Patent Office published only in electronic form, follows.

SEQUENCE LISTING (4198 sequences)

SEQ ID NO: 1 - DNA, 4472 bp, Homo sapiens
ccgcagacgcctgggaactgcggccgcgggctcgcgctcctcgccaggccctgccgccgggctgccatccttgccctgccatgtctcgccggaagcctgcgtcgggcggcctcgctgcctccagctcagcccctgcgaggcaagcggttttgagccgattcttccagtctacgggaagcctgaaatccacctcctcctccacaggtgcagccgaccaggtggaccctggcgctgcagcggctgcagcggccgcagcggccgcagcgcccccagcgcccccagctcccgccttcccgccccagctgccgccgcacatagctacagaaattgacagaagaaagaagagaccattggaaaatgatgggcctgttaaaaagaaagtaaagaaagtccaacaaaaggaaggaggaagtgatctgggaatgtctggcaactctgagccaaagaaatgtctgaggaccaggaatgtttcaaagtctctggaaaaattgaaagaattctgctgcgattctgcccttcctcaaagtagagtccagacagaatctctgcaggagagatttgcagttctgccaaaatgtactgattttgatgatatcagtcttctacacgcaaagaatgcagtttcttctgaagattcgaaacgtcaaattaatcaaaaggacacaacactttttgatctcagtcagtttggatcatcaaatacaagtcatgaaaatttacagaaaactgcttccaaatcagctaacaaacggtccaaaagcatctatacgccgctagaattacaatacatagaaatgaagcagcagcacaaagatgcagttttgtgtgtggaatgtggatataagtatagattctttggggaagatgcagagattgcagcccgagagctcaatatttattgccatttagatcacaactttatgacagcaagtatacctactcacagactgtttgttcatgtacgccgcctggtggcaaaaggatataaggtgggagttgtgaagcaaactgaaactgcagcattaaaggccattggagacaacagaagttcactcttttcccggaaattgactgccctttatacaaaatctacacttattggagaagatgtgaatcccctaatcaagctggatgatgctgtaaatgttgatgagataatgactgatacttctaccagctatcttctgtgcatctctgaaaataaggaaaatgttagggacaaaaaaaagggcaacatttttattggcattgtgggagtgcagcctgccacaggcgaggttgtgtttgatagtttccaggactctgcttctcgttcagagctagaaacccggatgtcaagcctgcagccagtagagctgctgcttccttcggccttgtccgagcaaacagaggcgctcatccacagagccacatctgttagtgtgcaggatgacagaattcgagtcgaaaggatggataacatttattttgaatacagccatgctttccaggcagttacagagttttatgcaaaagatacagttgacatcaaaggttctcaaattatttctggcattgttaacttagagaagcctgtgatttgctctttggctgccatcataaaatacctcaaagaattcaacttggaaaagatgctctccaaacctgagaattttaaacagctatcaagtaaaatggaatttatgacaattaatggaacaacattaaggaatctggaaatcctacagaatcagactgatatgaaaaccaaaggaagtttgctgtgggttttagaccacactaaaacttcatttgggagacggaagttaaagaagtgggtgacccagccactccttaaattaagggaaataaatgcccggcttgatgctgtatcggaagttctccattcagaatctagtgtgtttggtcagatagaaaatcatctacgtaaattgcccgacatagagaggggactctgtagcatttatcacaaaaaatgttctacccaagagttcttcttgattgtcaaaactttatatcacctaaagtcagaatttcaagcaataatacctgctgttaattcccacattcagtcagacttgctccggaccgttattttagaaattcctgaactcctcagtccagtggagcattacttaaagatactcaatgaacaagctgccaaagttggggataaaactgaattatttaaagacctttctgacttccctttaataaaaaagaggaaggatgaaattcaaggtgttattgacgagatccgaatgcatttgcaagaaatacgaaaaatactaaaaaatccttctgcacaatatgtgacagtatcaggacaggagtttatgatagaaataaagaactctgctgtatcttgtataccaactgattgggtaaaggttggaagcacaaaagctgtgagccgctttcactctccttttattgtagaaaattacagacatctgaatcagctccgggagcagctagtccttgactgcagtgctgaatggcttgattttctagagaaattcagtgaacattatcactccttgtgtaaagcagtgcatcacctagcaactgttgactgcattttctccctggccaaggtcgctaagcaaggagattactgcagaccaactgtacaagaagaaagaaaaattgtaataaaaaatggaaggcaccctgtgattgatgtgttgctgggagaacaggatcaatatgtcccaaataatacagatttatcagaggactcagagagagtaatgataattaccggaccaaacatgggtggaaagagctcctacataaaacaagttgcattgattaccatcatggctcagattggctcctatgttcctgcagaagaagcgacaattgggattgtggatggcattttcacaaggatgggtgctgcagacaatatatataaaggacagagtacatttatggaagaactgactgacacagcagaaataatcagaaaagcaacatcacagtccttggttatcttggatgaactaggaagagggacgagcactcatgatggaattgccattgcctatgctacacttgagtatttcatcagagatgtgaaatccttaaccctgtttgtcacccattatccgccagtttgtgaactagaaaaaaattactcacaccaggtggggaattaccacatgggattcttggtcagtgaggatgaaagcaaactggatccaggcgcagcagaacaagtccctgattttgtcaccttcctttaccaaataactagaggaattgcagcaaggagttatggattaaatgtggctaaactagcagatgttcctggagaaattttgaagaaagcagctcacaagtcaaaagagctggaaggattaataaatacgaaaagaaagagactcaagtattttgcaaagttatggacgatgcataatgcacaagacctgcagaagtggacagaggagttcaacatggaagaaacacagacttctcttcttcattaaaatgaagactacatttgtgaacaaaaaatggagaattaaaaataccaactgtacaaaataactctccagtaacagcctatctttgtgtgacatgtgagcataaaattatgaccatggtatattcctattggaaacagagaggtttttctgaagacagtctttttcaagtttctgtcttcctaacttttctacgtataaacactcttgaatagacttccactttgtaattagaaaattttatggacagtaagtccagtaaagccttaagtggcagaatataattcccaagcttttggagggtgatataaaaatttacttgatatttttatttgtttcagttcagataattggcaactgggtgaatctggcaggaatctatccattgaactaaaataattttattatgcaaccagtttatccaccaagaacataagaattttttataagtagaaagaattggccaggcatggtggctcatgcctgtaatcccagcactttgggaggccaaggtaggcagatcacctgaggtcaggagttcaagaccagcctggccaacatggcaaaaccccatctttactaaaaatataaagtacatctctactaaaaatacgaaaaaattagctgggcatggtggcgcacacctgtagtcccagctactccggaggctgaggcaggagaatctcttgaacctgggaggcggaggttgcaatgagccgagatcacgtcactgcactccagcttgggcaacagagcaagactccatctcaaaaaaaaaaaaagaaaaaagaaaagaaatagaattatcaagcttttaaaaactagagcacagaaggaataaggtcatgaaatttaaaaggttaaatattgtcataggattaagcagtttaaagattgttggatgaaattatttgtcattcattcaagtaataaatatttaatgaatacttgctataaaaaaaaaaaaaaaaaaaaaaaaaa

SEQ ID NO: 2 - DNA, 228000 bp, Homo sapiens
ccggggcagggatgcttgcatgtgtaatcttactaagagctaataggctacgaccaaacctatttgtttatggggtggtatgagcctgtcgaaacattttcagtgtattgctttgaggaagtaagctacataaaccgtatggggtgtctttggggtttggttggttcggggtatggggctagcagcggtgtatatgttgagtaaggtgggcagggagttgcattgatggggttagtagaatgtgagttgagggaggatgatgtgttagttgaggggtgactgttaaaaatgcataccgccaaaagatgaaatttgaaatctggttaggctgatgttagggctctttgtttttggggtttggcagagatctcctttaaaaaactgaacttaaaagtcttaccaaaattcatacttatcactcattacctaaatctaactatttttccctttggcattatccaatttatatccaatatttagttttaatcatttgcaattgtgtatgacatagtaaagattctggggaggccaagatgggcagatcacgaggtcaggagatcgagaccatcctggctaacacggtgaaaccccgtctctactaaaaatacaaaaaattagccaggtgtggtggcaggcgtctgtagtcccagctactcaggaggctgaggcagaagaatggtgtgaacccgggaggcggagcttgcagtgagcggagatcgcgccactgcactccagcctgggcgacagagcaagactccctcttaaaaaaaaaaaaaaaaaagattctgagtcaaagtgctcaagttgaatgcattttgtcacccacaagacaaaacgtgttaaccccttgtggtttactttatctataaaatagagataacaatagttcctgcttctagggttgttgtgggaattaaagacttagaataatgttcagcctctaatcagtgctgtcacaactgtctgatacaattgtattatatttgtgtactttgtagattgatattaaatcatacttttaaaaataggtgcttaatgttccactcaattaccttaaaacatgtttaattatgtctctatcctactcttataacacttctataaaaactttttacatatagcgtccacttttggttcagtttcttaggaaaataactttgagagtcagctatctgaaccaaagaaacattaacattaccagactatattgggatttttgagactggcttttatcaattctttagctacgggctcttgtcatcatctctaccagtgacctaagtgtcaaacccaaatgccttgtatctgtcccattaaagagatgcagcatctgctcctttcttactgtttccatttcctctgccatgcctcctcttacaaccataaatatccaggtctcttaggttttaaacggggcatctctcaacccccacattcttttccttggttattcccttccctccaacagttcaattcacctagatccccacgcctgaaattatcctagatgtcctagaggcgcctcatcattacaatggtacattattctccactcctttacatgtcacgccagctttcaaactgaaaatctgagcgttcatccctggtgcatcacctttaaattcgagatctccaaaatccagggtcatgtaaccttaaaaaatttttaccctctcttctccactgcccttgttcaggccttatctcttccagcagctgttccaaaggcctactctgttttcctttcggagtgctcacctccaccgaagcctccacccagctgccaattctgccccatgcctgataatttgctcgtgcgttgacatacataaaatttctaagacaaaaattttttaataatggtaaatgaaccttgggaactgcatacagatcatacagatccataataagagaaaaggtcccagattaacacggaaaactttccatttaactaacatttgcactggtaaacttcatcaagcaagaccctacttaatcccacattaccttctactgaagaggttgtggtcattctctggaaatatctgaattcattcctacaagttagagaaacagcgttactcgaaacattatcccttgggctcgagctctaaggcacctgacaaacggagcgctgtgggtaggggtgaggtgttttctccagggctgggactttgccctgggcgagggcgccgcagggcaaagacctcaccgggcagcagaatccgggcagaaatcagcaactgggcctcccgcgcagcagaaaaggggaatccagtcgggcccacccttcctgccagcgcagaccgcaagtctggccccatcctctcgccgggagtcggccaccccgaccgtgggcagcctgcgcccgtttgggtcccatcgccccggcccggcagatacctgagcggtggccagggcaggtccccgttcttgccgatgcccatgttctgggacacagcgacgatgcagtttagcgaaccaaccatgacagcagcgggaggacctccgagcccgctcgttacagcagaacgcgcggtcaagtttggcgcgaaattgtggccgccccgcccccctcgtccccatttgtgcaggcgaggccccgcccccccgccccggcgcacgcagggtcgcggcgtgctcgcgcccgcagacgcctgggaactgcggccgcgggctcgcgctcctcgccaggccctgccgccgggctgccatccttgccctgccatgtctcgccggaagcctgcgtcgggcggcctcgctgcctccagctcagcccctgcgaggcaagcggttttgagccgattcttccagtctacgggaagcctgaaatccacctcctcctccacaggtgcagccgaccaggtggaccctggcgctgcagcggctgcagcggccgcagcggccgcagcgcccccagcgcccccagctcccgccttcccgccccagctgccgccgcacatagtaggttctgtctgggactgggcagggccatcggggctgggggggcggggcttgtgggtaaggcgggcggaggcggggaccctccgcccgatgatagggctggaggaggaaggggcgggctgaagaaggggaaggtgggaagagcccagccggggctacaaattgggtgaagcgctgaggttttagtacttccgtttgaggagataggcaaaggttatgcaggtttttaatggcaggcctgagacaggaactcaggtctcctgactcccattctgatgagggggcttgtgggcaaggggtgcgtcttttaacctccatcctttttttttttccttggtggtcgaagagttttactgattttttaaaaaagtgctggattgggtgactagaagaaagctgcccttaggtctccagtttttaagactgcaacagcatggctcaatatttgaaatcactacggttaaaagcagtcatattgtgcagttccccagtgaactctttttgtagtttagattataaagtctgaaatacagtttgggtggataaagtttcttaggatggtatagatgtgactaatcatggagtccttcctgttgccatccttcaacgcaataagtacgtttgtttgtttttaaaccagagatactgccacaggaaaagcccaagggtgacccctcacttgggtcacctgcacagtatttttcagattgaggctgtggaagggcattgaagactggtgtttagccacctaccgtgttttaatgtaggtggcagcttgggtgcttcaaaatcttgttcctttcgtatatatttctcccttaaaatgattactcctcttctgttttttttgaggacgagctacgttttcatgaattcaccaaaattttgcacccaccatttaaagggtagctggtgaaggacttatgtatgcttttggcaagttttctgccaagaaaaaattcataatcttgtcacatctttagtgatgaacataaaccttttaaacaggaaacacttaaattgcagtgaacatgtcaaaaatgatactgttcttttattacctatcttttcccctctgtgcctttgctacataactgtttatttcttagaggtattttatttagcatatgtaagtagggtgattcaagttttataattagagaaagctgaaggctcattgaatcaagaccggtagcagccttggtttcaattaattctaaacacggcttgagttgctgaggctcctgactatcagactctaccttgtcttttatggtgttaaaaacagttcacccatagggttttccagagctaaaagtagaggattctttgaagagtggatggcaaggaaccttgtcattcagttgtaaggtttaaattgcttcacatacgtcaggccttctcagagtagagataacacatcattttctaaccttcccgatataggctacagaaattgacagaagaaagaagagaccattggaaaatgatgggcctgttaaaaagaaagtaaagaaagtccaacaaaaggaaggaggaagtgatctgggaatgtctggcaactctggtgagttgtgggggattcttttttctcctcagtcatggctctggtattctggaattctccagagggcagaagagcgtattagaattgtgtcttttttctttgtggagaaaggtcccttttgttcctgagcagagtggccccctataggtgatggtgatgtgtataggaggttaaggggatggtagagctacaattctgcaatttagctgtagttctcccaactttctcctttattccttctagctatttttgtcctggttataaaattaaaacattcttgctacagaaatttcaaacagtacagaaatgtggaaggtaggcagtgatagaccccataatccctccctttgagtgaggcccactgctattggtgttctgtatatacttccagattttaaaaatttgtacatgtgtatatgtgcatagtcataagctcaaaaattagtttaaatatattttacagattatattatattctatactaatttgctactatctttttctacttaatagaaaattttgaacaattttcagtatcaggacctgcagatctactctccccgcttttttttgcttagagctgctctttgtgtatgtaaaaggcattgaataaaaacagcatgcctaggctgggcgcaggggctcacacctgtaatctcagcactttgggaggccaaggcaggtggatcacctgaggtcaggagtttaagaccagcctggccaacatggtgaaatcccatctccactaaaaatacaaaaattagttgggcgtgctggtagttgcctgtaatcccagctacttgggaggttgaggcaggagaatcacttgagcccaggaggcggaggttgcagtgagccaagattgtgccactgcactccaccctgggcaacaaagcgagactctgtctcaaaacaaaaaacaaacaaaaaacagcacaaaaataaataaaaacccagcctgcctgagtgcctgagttcctggatttctagaggtggtgttgcatatagacagttgagcagatttttctctagttttatggtaccagagaatttgtgataagggaagacaggaaatccatctttattcattatcctcaggaaattaggtaaagagaatgagaaaaaaaaaaagttccaattcagatagaggtatctgtccaatggagatatatgtaaaatattaatccttccataaaaggtaaaatttgaattttagggtcaacatgaaagtgttagtatgaaataactacaggaatggagatgtgtggctaaggagaaaagtaaatctaaaacttcacctttctggaggggtcatgcaaggaggcgtgacttgagagaatttgccacggttaatgttacaattctggggcagcctacctttcattgcttgattattctgcatagacccattttttaggtctacaaacactgaatgagcacctatgatttttattctagaggctttttgtagctcatttatttttcctaagaatgctttttgccctctttttttttttttgagatagggtctctcgctctgtcacccaggctggagtgcacttgtgcaatctcagctcactgtaacctcctgggttcaatctctgctcactgtaacctcctgggttcaagcaattctcctgcctcagcctcccgaatagctgggattacaggtgcgtgccaccacacctggctaatttttgtatttttagtagagtcagagttttgccatgttggctaggctggtctcaaactcctggcctcaagtgatctgcccgccttggcctcccaaagtgctgggattacaggcgtgagccactgcacccggcctgttgttctctttttatagaggaagaagtgggtgatagatgaagagaattgatgattatcacagttaagtaacttaactaagaccacatggggacagttgagatggaatgttgttgaaataagacaacacacttggcatattttaaaataggacctttgccacttgttaaaaatggcactaaggaagaagggggaggatcattcactagtcagaagctgggtgactgttccacttcagtttattttattttttagagacaggtcttactctgtcatccaggctggagtgtagtggcagggtcattgctcatgtagcctcaaactcctgggctcaagccatcctcctgccttagcttcctagtagcaaggaccacaggtgcatgccaccatgcctggctaattaaaaatatatatatttttttagagacagggttttgctgtgttgaccagattggtcttgaattcctggtcccaagccatcctcctgcctcagcccttcagtagctgggactgtgctcctgagccatcatacctggcaagttttttgtttttgtttttttctaataacagaattattaagatatagttcttggggccaggcacggtggctcacgcctgtaatcccagcactttgggaggccaaggcaggtgtatcacctgaggtcaggagttcgagaccagcctggcccacatggtgaaaccctgtctctgctaaaaatacaaaaattagccggatgtggtggcgggcgccagtggtcccagctactcaggaggctgaggcgggagaatcccttgagtctggaaggtggaggttgtagtgagccgagatcgtgccactgcactccaagctgggtgacagagtgagattctgtctcaaaaaaaaaaaaaaagatacagttatgcaatatgattcacccatttagcatgcacaattcggtggcttttaggatattcccagagttgtgcaaccatcatcaaagtcaattttagaacattttcatcaccccaaaagaaaccctgtgcccattaacagccacctcctgttctgccccagcactccccagccctaggtaaccactaatctactttctgtgtatagatttgcctattctgaacatttcatataaatggaatcatacaatatgtggcctttggtgtctggtttcttgcagttactgtaatgttttcaaggctcatccgtgttgtagcatgtatcagtacttcattcccttttctaaaaatattcattttctttattgtggtaaaatatacataacataaaatttatcatcctagacatttttaagtatacagcccaggggtatttagtacatttatattgttatgcacccaccaccaccatccatctccagaactcattttatcttgcattcctataactctgtacccattaaacactgactcactgtaacccccttcccccagcccctggcgcctaccattcagctttctgtctctatcattttggctactctataatgcattcattcctttttatttccaggcagtattccattgtatatatccacctcagttcttaactcttcaattaacaagttattttttatacctgggatccacgggggaaggaaacttttatactcacaagcaaacttagatacatttgaaaagccagttaagtacgtatttttgaaaaccaagggaataataataaagtaagagatgcatagtccattttcacactgctgataaagacataccagagactgggaagaaaaagaggtttaattggacttacagttccacatggctggggaggcctcagaaacattgtgggagttgaaaggcacttcttttttttttttttcttaatttaagttctgggatacatgtgtagaacatgcaggtttgttgaaaggcacttcttacatggcggtggcaagagaaaatgaggaagaaggaaaggtgggaacccctgataaacccatcagatttcatgagacttattcactatcatgggaatagcatgggaaagactggctcccatgattcctcccactgggtcctcccactgggttacctctcactgggtccctaccacaacacgtgggaattctgggagataaaattcaagttgatatttgggtcggggcacagtcaaactatatcacattggaaaagattcaaaaatatatttttagcataaaggaagtcatggtaaacaaggtaactgtatattggaaaagtcatatttagaagaaaagagtcactgtatttcttcggagattcttagcctttagcatataagacatcaaaggttttttatttttaattatagagggttgtctttttctctggttgcttttaagattttctcttaatcactgattttcatgtttgattttctttctgccccatataatctgcaggaacccatatttgattttggtggaccttgtctctttcccccacacccgagacagcctgtgctgtctagcacaggctggagtgcagtggcacaatctcagctgactgcaacctctgccccgccaagtttaagcaattctcctgcctcagcctctggagtagctgggattacaggcactcgccaccacgcctggttaatttttgtatttttaatagagatggggtttcaccatgttggccatgttggtcttgaactcctgacctcgtgatctacccgcctcggcctcccaaagtgctaggattacaggcatgagccaccgtgcccagctgcctttgtctggtttttaatttttatttcttcatttatttttatcctgtttagagctcatttaaagcttctcgagtctgtgggtttataggtcttattaaatgtgggaaacttttttggttgttattgtttcacattttttctgtcttcctgtctcttgtgtctccttctgagagtttattacggggatgttaactatttggtgttatctgttaagtcattgaggctctttccatttgttttccaggcttatttctctttgtacttcattgtggatagattctactgctctgttttcaagttcagtggtctttttttctgctatgtctaatctgctgtaaatctcgtttaataaaatgttcgttttccatattgtatgtttcatctccagaagttccattttgttcttttaaaatattttccagttctctatatgaattatatctcagtaaagctaaaaaaaattccttttgctcctctttttgctcatgttttcctttacattcttaattatatggagcatatttataaattgtattttcttgttcttatatgctaattgcatcatatctgtcatttctggggctgcatcccttgacagatttttcctattttttgcatgtctagtaactaattatttggatcatggatatgttgaatctgtgttgtctcctgctggagtttgtatttctttagagtgttggactctgttctggcaagcaattaaattcctttggatcactttggtctttttaaggattgtttttaaacttcggtagagaataatagcccttactctagagcaactttagtcacattctacggcttgacctttttagagttagaaagggggtgcatagtagcagtagcacaccattatatcgtatttccacaatacagagacagtagacattagtaacattaagaatgtaaacacagccatatgctacctaatgacagtcagtgagggaccacctatacaacattaatctcataagattataataggtatttttgctgtaccatttctatgtttaaatatgtttagatacacagatacttaccattgtgttacagttgtctctagtattcagtacagtaacatgctatacaggtttataacccgggagcaataaactataccatatagcctaggtgtgtaggaggctataccatcatctaggtttgtgtaagtacactctctgatgtgcacacaatgatgaaatcacctaatgacacattcttcataacatatccccatcattaaatgatgcaagactgtcaacacctgtagtaagttttaggcagtgagtatttattattcatctagtagcatctgccagacataagagtccctgattatttcatctctgtttttaacactttggttttaaatactgtcaaagtcaaataaaatatagggacaaatctctaaaacattttatttggggcggggcacggtggctcacgcctttaatcacagcactttgggaggcggaggcaggcggatcacctgagttcaggagttcgagaccagcctggccaacatgatgaaaccccgtctctactaaaaatacaaaaattagccagatatggtggcacacacctgtaatcccagctattcaggaggctgaagtaggagaattacttgaatccaggaggcagaggttgcagtgagccgagatcgcgccattgcactccagcctgggtgacagagtgagactctgtctcaaaaaaaaaaaaaattttatttgggaagcaagaattgcaatttgggacatacacacagaccaggtggtctttggtatgtttgaagcacaaagagaaaattggaggttttattaaaaaggagaaataagccaggagcagtggctcacatctgtattcctaacgctttgagaggccaaagcaggaagattatttgagcccaggagtcagagaccagcctaggcaacatagggagaccctgtctatacaaaaaattaaaaaaaaattagttggccatggtggcacttgcctgtagttccagctactcaggaggctgaggtgggaggatctcttgagcctgggaggtcaaggttggaaaaagaaaatgtattgttttgaacgaaggttcattggtacttggaaaatttggagtaactggcaagctctgattagtgaatgactgcaatgggtaaaactagccatagagtcacagcaggttgttttagcagctatcaggtaaaattggtttcaggttacagtaggcagtttcagcagctaggcttgcagagaattacatttttggagcaatgatatgtgctctcagtgctttttcccctggcctctctactccatttcaattgagtatgacaagaatgacccaatttatatgatcaactttcacaatactttttttttttttcccagcaaatacaactccaagatcttcatcccactttcattccaggcagtttttttttatgtctataggagggaaactctttgtataacatacacacttatagtatatttttgaagagcgatacaaatatacatttcaaaaaagagagtaatagtaaacaaggtgaatatacatttgagaaaagagtcaaatttaaatttttgtggctagaaaattcacaggagatctaatgaaagcctgtgaagaggtttaaatataaatagggaaaattttaaactattttttttgaagcaacaaaagcagagatttattggaaacaaaaagtacactccacagggtgggagtgggccctagcaagcagcttgggagcaattttaaacttttagaaatgaacaaaacacaactcttgccctcagagtgtttttgctttaatagggaaggtaagaggtgataaatgtgtgcagtcccagttcctttacatttaatagcaccaacctaatagtagtgctctaaacggtgaaatactgtgttctagtacatggtagggatccagaaaatgatagtttcccttcttttatggattgcttgtttatgaaaaactgccaattggcagactgtgatgagtgccacagggagatgtgatcttgttagaggaacacagagaaagaaaagatgattttaagctgtgaaaattagcagaaggttttatgggaaaggtagatttgagatgggtcttgaagaatgaatacaattttgacatgcagaaagcatatcatgggcaaagtgatggtgtttctgagtatggtgatttggttttcttggtaaacccctgatgtcaatatcaagtctttccgcttgagctagtaagatttcccagtcaagagtcctcccagcttctgcctggaggggagtaggagtgctctggcttcctgggttctggagaggccgtggatctcagcatacattgtgtctgtgttcctaatcgtccttctgggttaggtacagtactccatcaactgtgcttgttttgcctttccagggaagaaatctccagttggctgctgatgtggaggaaggacagttgtctttgagcttggagtatggtaggggtttagggaacaaattgctttgaaccaatcctctttattttagaacctccctttattcctttccagagctactggtactctaattcctgagtcttttgagcattttgtgttgtaattagagttggctcttggttttcctaattactgacttagtatttagctctcaggtgtgctgaattggttactgttcatttgttttcctttctagctttagatatctcatttgcagttgttacctctcctctctgtccttatgggcttatgtcttcaaaaaaaaacaaaaacaaaaaagaaaaaaaacctctactatagtaatgaggtttcaggaatgagtgaaattgcatctgtgtttaatatgccatctttaccctgaacccagtgtttctttctttttttaaaaaaatcacattatagttagattcattgctttattgggaatctacctctttaaaaaattctatgctggttatgaattgacataatgagaccaaaattactattgttctgttttcttcttatttgctgcctaagagccaaagaaatgtctgaggaccaggaatgtttcaaagtctctggaaaaattgaaagaattctgctgcgattctgcccttcctcaaagtagagtccagacagaatctctgcaggagagatttgcagttctgccaaaatgtactgattttgatgatatcagtcttctacacgcaaagaatgcagtttcttctgaagattcgaaacgtcaaattaatcaaaaggtatgtaactgctatagatgagtatccagttacctagaatagtgggttctgaagtactgtcaggttctctgaggtcattcatggcaatggttcctaaacttggatggtcttctgaatcatctgagggagcttttgtgttttagtttagttttcttacatccctggagattcgatttactgtgttttgggagggattaattggtttgtatgggaacaaaacaaaagccttccaggtaattctgaggtattgcctggatcaggagcccttgacttggagggattctttattgagaattaatacaagcacagtttcttacagtcttccttagagtttccatgattaccgtggaaaatcatgatgggcaacttagatattttgaggtttcagttgaaagcttgatagatagaaagtaaattcaaatgtaagccaaatgaacatgggctttttactttatccactatttgttttgagacttttaatggttttcataactgcagaatcagggaatttaactcatgctccatcattgaaatctgtaattcagaatagtgattggttcgcaaccttagctttacattggaatcacctggagaacttcaaacaaaaattgccattaagaaccttccctcagaatcttatctaattggttttcactgacaaatgggcatggatattttttaaaagtttacattttattttgtattttatttttattgatggagtcttgctctgttgtccaggctagagtacagttgtgcgattatagttcactgtagtctcaaacttctggtctcaagcaatcctcccaccttagcctgcagatgaggtgagactaaaggaaaagcagtcattttaatctgtagctgtgattgacaaccattgaattagagaaatggttctatatatgtatatgtatgtgtgtatgtatatatatgagtcattgaaattctaatgaaagctgttggcctttttcttcagaaaaattctcaagccaacaaaattttgcctataattttcaagatttcacacctttcccacaaagcccagatccatgaactcctccctcagccaggctaatattgattgacttatcttagatcatcaagaaaaaaaaggtgtttttgtttttagtctcttttaatacttagaagcagttcacctaagtatagtggttattaagcatagaagtcataaagtttatccattaaagctcactttattgataggagcatttactccaaggtctcagaagagcgtatacattattgctttatacatagaatgaccaacttggcatgtccacatcacaggaaattagaagtaagtagacagagggggcacgtagaagcagtgccattattacaggtgataagctgtttgatggcatggatagacgtggatgaatggcaaaaagctactgagtgaacataaatgccccatggtccaggaccattagggtggggtcagcaatgccataactctcaataggtttcgaaatatattctgatcactctgaattgtccagacaaggttaaattgagttcagcatactgtctctgggaatatgaaatagaatgtaatgtatctgatgagtatttctatccaaatcattttttttaaagttgcttattttgttacccaggtattaatatgtacaacaaaccctcatgacacaagttttcctatataacaaacctgcacatgtacccctgaacttaaaatgaaagttaaaaaaaagttgcttaatattcaagtatttagattgatttaattgttagcatcccataaggataaaacttttttttcctggaagcttatctcatttcctaaaagaataaagtataaagtaagaataagtttttacaatgtaagaaatatattttctgtgttgattaacttttatactacatagtatatacctgcatttaatatagaatacatactatattccatgacataaaagtcatggaaacaaaataggaaactcatcaaaattaaaagcaaaggcattcttaggtataggaaaattgttatgcaatccttggggtgttgcttcgccagctgtaaacctctgtggctggtggtgcctttgcccgagtttttacttgggcctgctgggctcattcctcccactcggcctggcaggctgtgcttggcttttgcttttggcctgaatctcgcagctgccaagggtgagccaggagtggagtggtgagggtgaggggtgtgtgagcaggtgaccatggggtctggcccctgtgcactgccaggcatgctggcttcggcagggtgggcagctccaggtgccagcgtgagtgagggctggaccaggcgtaccacaaacagcttccacagctggcaccagggaacacagtggcgcccagaagcttggagattccaggaactgcagagccccagagagggtgtcatagacctggcttaggagcccctaggtctgagctccccagaggtccacagctcttctctcctgtcttctctccttcttgttgctgcaatgtggcaagcaagagatgggtttcaggcctgtttgtgttacagctcttttagccctgccattcggtgggtcccaggttcttgtcctgcttccaggaagaatgaagtatgtggacgagtggagggtgagcaaggcaaagaggggcttccttgagtgacagaacattgaggggagacccgcagtgggtgcttctttctgcaggcagggcatcccatcaagtgagaagtgatgagccttcagccgagaggggaccctggagtgggtagctcctctccgcaggcaggttgtctgcttgtctcttcaagtttggccgagtctggggatttgtatgggcttgagaggaggaagtgtgtgctgattggttcatgggctgccatgggcgggctcagaaaacaccgtaagttctaattctggttcgtcagcctggcccccaggcttcaggctgttcctggcttgaaggtggggcttcacccggacctgaccctttctgctcaggagcctgtctgcctcctgccgtcatccatggcacccaggctgtttgtgccatggggcacctgcaggacagctctgagctgccctcagccctctccttggcctccttcccatgttcatcagtgtccaaagtccagagggggccgaggcagcagggggctggcatgttagcactgccctgagcatgtgcacacccagccaggttgcaacagttcctaggcttggccttaactttgagatcagagtgggtgctgggagctgggagaggccaggcagtcggagcaggtacttctgagcctgcagagggagggggaattccctttctgggcccttgagattgcagagatgcccgggtccacagccacagcttgggtggctgtggctgcagctgcacccaggagggtggggctcctgcctgctcccagcccccaagagcacagggatgcccaggtttgcagccacaactgggcagccacagctgtgcccagggagcgtgaggctctcaccctgccaactcagaagggggcgaggcttcttccacccatttctggctcctgtcggttctgtggagcatgcagccctggctgcgcctctcctactgcagctggcgttacggcagtggctgctccagatgggctgccattgccatcataatgacctggatttctcttgccaacctctccatgcctcaccgtcttcttattgctgatctttggaggtttgctggactgcactgttcaaataaattgagttttttttgaaaagttagtatctttacctgatgtcccggtgaagctgaattgttttaaacatttgggaactacaaagtgtacatgtttctgggttttcttttggattggggttcccatttctgggccattttgcttctctctcactctcccctcttctttttggtcactagatttttaggccatatttttcattgtagggggagctgggtaaatttttagaagttggcagtgacagagtggcaattaattagaagttggatttagccaactataaatttgtctcatttacatttttctaaattaagtctaataagcgaggaattttccctaagctgtgaattggaattaattatggttcctcacagaaaggtaagaatagtaggagtactaatgttgaaaatgtggccttgtgctgtaaattttttaacagctctttctcatgtttctttaccaagagaatcatggttctttctttctataagaatttatagaatgtgctgtcttttacagtgtgcttggaagtataaaacattaagtgcagctttatctgttggcatgctttgctcaaagtggttttgccctactcctgagagagagccagatttgtccccattggccttttgtgcattacacaccttagaataaataataaaaagaaaataagtgttaataataatagatttaatgaaatcaaatttaaaaacaagtatgtaaaacattaagatatttagactttcaaaatttgcataaaaattctatgatagcttacttggttcataattttttttaaccttctactttgaaaatatttgtaacctatggatagtttgccggaatgctacaatgtgcttctataaacttttcatctagattcactaagtgttagctttttgccagatttgcattttccgtctctgggaacttattattgtggttaatatttttaaaactttatacatcttttggttgccaggacacaacactttttgatctcagtcagtttggatcatcaaatacaagtcatgaaaatttacagaaaactgcttccaaatcagctaacaaacggtccaaaagcatctatacgccgctagaattacaatacatagaaatgaagcagcagcacaaagatgcagttttgtgtgtggaatgtggatataagtatagattctttggggaagatgcagaggtaagtcgtcttttcaggcactattttatatttttcttgtctagccttagatatttttcagtatttttgtttcattttctgaccttatataaaagctgatttgatcaatcaccttttaaaaaatactgttatgtaaagtaaaaactaaaaatgaacacaagaaacttggtgggaaccagacttggtgggaaaaagtgaggggtctctattggaatgttagcgcttattctccgtggtactaggccagtactttttatccatccaaagttaattggatgagtcaattagtgaataaaccgtaatcatgtaaatatgttttctaatgaagactcaagcaagaaaacatttttgagatgtatagaagttcctctgtttactcttaatttatgaattttcatagccaggaacaaagttaagtctcaatggaagaacacgtgaactttaccagctaccaccagaagttgtttgaagttttacagatctctttgggtgtcagtcaacttggtgtcttagtctaaattgggattgtgccaggtgtggtggctcatgcttataatcccagcacttcgggaagctgaggtgggtggatcacttgaggtcaggagtttgagaccagcctggccaacatggtgaaaccgcatctctactaaaaatattaaaaaaattagcccggtgtggtggtgcatgcctttagtcccagctcctcaggaggctgaggcaggagagtcgcttgaacccgggagatggaggttgcagtgagccgagatcctgccattgcactctagcctgggcggcacagcaagactctgtctcaaaaaaaaaaaaaaattgggattgtatttaatgttgaaatatttattataggccctagtcaagaaggttgaaagtgaaatttgaacatttcataggcaaacttagggaaagtattgcagatgacacctttgttggaagtcatgaatgcttgtgatgattctatagtttgggacctggttggattgtacactagagagtgatgaggtagcatgtctgtgcttcttggatgggaagtaaagacttggccaactttttttcttcaagtttcctaaatcctctgtggcaggcaagcagcgttctcaaagtcagatgcattatgcaatgttctgtgatattaaattaggctctgagataatgtcaccatgttttctgagggcaggaacaaatatgtagttgtcatcccctaggcgaaggagagaaactgtctaggttaaacggtaaattcagacctgaccacggtaaaggctgatgtttttctgcccttctgtgagggactaatagagttcagagaaggggtgaggttggggagcgagagtgttagaattagagttccatggcttcagtgggcaatatctaagccatggtgctttctagaggaaatcagggaatcacatggtgcttcatggttctatatttctatcagtcgtgcatcattaattagttagccagcctggggtttctctttttactttttcaatgatttctctgtccggatgggttcatcatttctgcatactctgtagtgtcttctaaatgtcagtcatttgcacatgccatgtagcaaattcttactcttttacagtctcatgatctctgtattggatagtctttgtgtagggaaagctctaaggatgtagaagacctgtcatatttttctgagtcttttatagatacagatgttgatactgaagttaggtcactggaactgcccaaaatacattaaaccataggcttctatacagggaacatttttttaaactttttattgacatagtacacatttagattaagtgtacaaatcctaaatgtataccttgattaatttttaataaagtgaaccaacatcacatagggaatcttaaaatataaatttattgatattttcttttttcattttttagattgcagcccgagagctcaatatttattgccatttagatcacaactttatgacagcaagtatacctactcacagactgtttgttcatgtacgccgcctggtggcaaaaggatataaggtcagctttggctttaacttgtggggaaaggaaattgggattctcctccagagagtgcaaacgtgttttgtaaggtggtaggtaggcttcaattggtttagaattttgcattttacagaactgaaagtgtttcataattattagtattatgtatttatgagtttttaacatattgttagatatttagggtaaatttttaaactctatgatagtgtttcttagcaaattatccacccttgtcaactcctttaaaccctacatctgaacgttgtggactgattattttaaccatttcagaattgacgtttaaacatttcgaaatgagtttttacaagtcattttttatcctttgatagcaatatttcttatttttgttgaaggtgggagttgtgaagcaaactgaaactgcagcattaaaggccattggagacaacagaagttcactcttttcccggaaattgactgccctttatacaaaatctacacttattggagaagatatcctttttggacgggagtttttctcttaaatgatacaagggctttgttggcaggttttgtttgtttgtttgtttgttttttagttgctctttgggaactttttagatgagctgagaggcattaaggtgaacccttgattaggtgtgctattcaagagggaagtagtggctggaaacaagcatcttttcacatgtcatagtagaaggcaagttcatcatacttcaagagcaagaaaaaaagcaaccctaataaaagacgatgtcaggttagtatctgatttgaaattatatcttccttagcccatttgtgggaagtagttaggtgcttagggcctacaagctcctcagggtctttccaaagtgagacctaaaaagtaacttattgaagccaggcgctgtggctcatgcctttaatcccagcactttgggagactgaagtgggcagattgcttgagcccaggagtttgagaccagcctggacaacatggcaaaaccccatctccacaaaaatacaaaaaattagctgggcatgttggcacttgcccgtagtcccagctacttgggtggctgaggtgggacaatcacgtcagcctaggaagtagaggctgcagtgagccgtgatcatgccactgcattccagcctgggtgacaggagtgagaccctgtctcaaacaaacaaacaaacaaacaaaccaaaaattcaaaatgtgaaaagagaactggctgaagtcagaattaagacagagttaaatgcctataaaatatagtggtagcccgtcttcattaattgttaactttataaaaattttattacttttgaaaatgggctgtgggtgaagttttctcacttggtaagaattttcaatgtgcataatgattgcccctaaatttacggtcatttataaatgcagtgtgttatttgatgccaaataatttcaaaagcaaaattgtcagtttcaaaagccaaataattatatgtaaaattagaccagggtgcatttaaaaaaaattactatgggggtggaatcagttctctgataatggaagaatggagagataagaaggccttaaatgatactgtgtgaaagtattatttctgttatggtttattacagatctgcttatttctcagctcatctaattctaaggactgttttgttccatgaatactataaatagggaacagctatcactcaaaatgggctccaaactattaacagccttgtgttgttctaagctgatcaggctgtaagaacctggtatttttattttttcttttgctaaagcttgagtctgttatttgaagcccatttctagtacagtccccctccctgcttttcctttgctgcttttatgggtcctatgtcctgatgtccaaagatatgtccagactttgccccaaatcagctttcatccctgagatttagttaatggactcattttatacacacatacacagacatacatgcacatataatgtatatatgtttctgttttctcatgtctttaaaaaattgtcttgctatatctgggagcttttaggtacattaaaaaaggaaaataatttacacccttttagtgtatttatactttgaattgtggaattaaacattatgggattgttaaggattcaagtctcagcatcatccaagtgatgaagtgggttgatatttgggcctccatggggtctggtgtactccactaagccctttggaagtaagatactggttatctgtctttatgctctttatatcttaggaaagataaggcatgcaactatgatccaaataaatcagaagaatgaatactgggcagaagatttttgcaaagggcagaagtactgtgtgaaatgaaccatcattttattatttttttctttatttttatttttttattttgtagagacagcatcttgctttgttgcccagggtggtctctcaaactcctagccttaagtaatcctaccaccttggcctcctaaagtgctgggattacaggtgtgagccactgcgcctggctgtgaaccattattttaaaggagaaaatagttaatattattggaaatttagcatattaggatttagaatttagcatataattatttttctttaattattattaaatgtgaatcccctaatcaagctggatgatgctgtaaatgttgatgagataatgactgatacttctaccagctatcttctgtgcatctctgaaaataaggaaaatgttagggacaaaaaaaagggcaacatttttattggcattgtggtaagtactttgcaggtgaggaacaaatgttagatgttcatggtatctctaaatatgatctatcatgtatggtttataataaggatatctgatgaagtgtaccttcagataattatacaagaaaaacatttttctcacaatattatatgttaaatcgctagttacaattttctcatggctacttggtacttgtagcagtccattctcacgttgctataaagaaccacttgagactgggtaatttataaagaaaagaggtttaattggctcatggttccacaggctgtacaggaagcatggctgaggaggcctcaggaaacttacaatcatggcgaaaggcgaaggggaagcagtgacatcttcacaagcacaaggctagcaggagagagagtgaagggggaagtgctacacacttttaaacaaccagatattgtgagaactgtcatgagaacagcaaggaggaaatctggcctcacaatctaatcacctcccaccaggtctccccctcagcattggggattacaattcaacatgaggtttgggtggggacacagccaaaccatatcaatactctatgctatggagagatccagatggtcttggtccatgtgccctgagattttaaggttgaagatagacacaatggcagacatatgtgtggacaatgtacagatagcagaataaaacactaagccaacacaagcatggtggcaaagtgttctataaatttcctctagggatttgaaattaaacatgaatgactatggtattatatctagatttggaggaggggatagttaaagagaaatgataattggctgatataaaataccatactaaattaatattaggattatttacagtcagttttctagataaatgtaatttgtgaattatagttttatttatttatttctttgagacggagtttcacccttgtcacccaggctggagtgcaatggcgtgatcttggctcactgcaacctctgcctcctaggttcaagcaattctcctgcctcagcctcccgagtagctgggactacagtcacccaccatcataccaggctaatttttgtatttttagtagaaatggggtttcaccacgttggacaggctggtcttgaactcctgacctcaggtgatcagcccacctcggcctcccaaaatgttaggattacaggcgtgagccaccacgcctggccaactcatagttttattgattttctggcagtttatgaataaatttgctcatttacagacttacgtggactctgctaaaggtcttagactttttaaggcccttcagaacaatcagacaccccttttctgttgtaagttaagcacaaatggaactctgtccaagtgaaaactaattctctttgctttttctaatttctacggtcagtggcaatatcaacaaaaattcttaccatctgaatgtctccaatgtgccttttaataccttattttgactgcataactctgtgttaacttgacatttgcttaaccaataagcccttctttcagagagttagcattcctgttggtgttagacagctctaaatgatatttttatccttgagaagcacgttttatctagctacaggcatttggacctatatacaaatagtaaagttatttacttttaagctttaacatatgtaatgtgctattttatatttacctaaaactccttctaaagaacagagttgatagtatataattcctacttagtgcatttagaaataccatctggcttaccgccagagttaaccatgtgtgcgaactgggactcggaaaaatgaaaacagccgtttgcccttcaagcattttctttggggctgtcctttacttcagcaaccacttttgggctgatgacatcctgagctctgggtccaggctgcacctctctcgagctccaggctcctgcatccaaatttttattgaacagagatacttagaatttactctggctcctcaaactcagtgtggccaaaattgatcttatcttcttttaccctcgacactgttttccctgtcacaatgggtgtcactcattgcctggtcagtacctgggagtcaccttttgagtattggtaattagtctgaaattcaaagggctttgctgttgtagtatcactgcagtcaggctctgtgccttcagtctgggcagtgcagttttatacacactgattttaggtttctcagtgtgatacatatcacacagggtgatagatattgtgggtattacagtgtagaccatttctctgattaaagaaaaagggaatttggctgactgaaaaatttgttactttaacatctgtacctggtttttgtaaatgcttggtttgtagattggtatataaatttacatgtgtatccttatgtactgatagtccatctctctaggctctagagaaagcctctgggctagaattaaggatgttccttaattacagttagaggagctataacactgcctccaacccataagatccctgggtgtccattccctccagaggtgtctgtaatccagactttgaagatgataatttccttgcttttagttggagcttctagttccagccttgccaccttaaacgttatatacaaatgtaaatatagtgtgtgtattcttttgggttttgctccttttgtttaccattttgtatgtgagatttatttacatgtgtcgctgtagttctctcattgccttttcctatttcattttatgatctacagtttattcattcctgttgatggacatgtgcattctttctagtttacagttgtacagagaatgctgctgtaaatatttttgtatgtcttgtatcgtatacaaatgcctgagtttctccagagtatatccttgggggaggaattgctgaattatagggtgtggatacttcaacattcctagataatgccttgctgttgtcagaagtggctttccatcagtagtatatgaacatagggattggtgatttttcctctttttagctaatgcagcctgtaactagcccccatggctttcataagcatccgtagtggctaacagtgtggattggggagtagtcagatttcctgggtttgaatcttgactctactccattgtcactctgggaccttggctagaaacttcctatcacttctccaaaccatgatcttttccagtttatctttgctattattggcttaggatgttagggagcaggttcaagttggcatgattattctactggatagactgtctacttgggcttcattcagagtttgataaagtatacattttatgtgttactttgatgtatgaagtagtaatttactacagtactggtggtctggttactaggaccatgtcacttgttactttgagtgataactactatttgtacagtgctttatagtttacaaataattcctgtttattttataatttgatccttacaataaccttatgagagaagtaggctggtttggttccatttacagaggaagaaactgaggcctggcagtgtttggtaacttgccatagtcactccgttaggtatattaactccaggccttgtattcagggcggctctcggaaatctgatttatagtatcatttagatatctgtgagtctgactcttcgtgtaagagtcctgaaaagcagacaggtttctaacactttagaaatagagtacatacatactcctgagtgtatcatctttactttttccatgtttatgctgtgttatagccataactggggaaatacattttttctgtaacattatatttgtatttgtttttagggagtgcagcctgccacaggcgaggttgtgtttgatagtttccaggactctgcttctcgttcagagctagaaacccggatgtcaagcctgcagccagtagagctgctgcttccttcggccttgtccgagcaaacagaggcgctcatccacagagccacatctgttaggtaagttggcacatcactggaatataataccgattctgaaacttaggtttagttccaaaactgatacttattaaagttgctaaaaatagtttttacttacaaaaattatatttccactgtagtagtggaaatttaaaaaaaaaagtaaaacaacaaagctgggcatggtggcacatgcatgtaatctcagccacttgggaggctgaggaggaaggattgcttgagccccggaatctgagaccagcctgggcaactaaggtgagatctcatatctaaaaaacaaatagaagaaacaccacctacccctactatcaccttaatgtagaactttagaaggcagtctttttgaagaggtttctgatatttaatgatattatttgataattatggggtttatgatatttaattattggtaatcttcagtttctagagataatttagagttcacttcttacaaagtttatgtaactttggagatgctttgtctgtgctgcaagtttcaattcatggctgtgtccagtggttttgtttactggatctaagatcagaccacttacgtatgaagcagtgtgctaggcgctgtgcgtacagaggaagaagatgtggttatgatatatgtctggcagagtttacaacctcacatgagagtcagatgtgtgcatacctaactggacttaaaggcatgatgtattaagtgctaaacgtgaaggtgccttgttggaaagactccgtactgccacctggagtgtggtgggaaagagaccagaaaggtgtgctggggcttcagcgaagtagactgtatattgacgaatttggactttggactaggcagagaagcccatgaggattttcatgtagtaggtagacaaatcatttagaaaatcgaggccaggcacggtggctcacgcctgtaatcctagcactttgggaggctgaggcgggtggatcacctgaggtcagcagttcaagacagcttggccaaaaccccgtttctactaaaaaaaaaaaatacaaaaattagctgggtgtggtggcagacacctgtattcccagctaccccggaggctgaggcaggataatcgcttgaacttgggaagcagaggttgcaatgagccaagatcacaccacttcactccagcctgggcgaaagagcaagactcttatctcaaaaaaaaaaaaagaaaatcaaactgattgattaagtgaagttccatatgtttctttgtccttagtgttgtgttcattttcatttgaatttaatttctttcgaagtagctttcataatttgtttttctgattataaaactaatatatgttcattcagaagacaaaaaaaaaaggataaattcataagttgaattctgtaacccagagaaaatgactgttaaacattttggcacattatttccgtgtgtgtatatcacttttttccatttgtgaacttgcattcctgctgcaaaatcacttttctattctgtggtttttttttttttaactttacaattccccatttttaaaaactttattgcagaacatttcaaacatacacaaaattatacagaatagtgtcatgaactcctgtcactctattagccagcttcagcatttctcaggaccattctcatttttctacactccctccccttttctctctcccttgattattggctttgaagcaaatcctagggagcatcagtttatcctctaatatttcagtaggtacccttaaaaacaaaataagtacatgacattgtcatataagtgtatcataatttatccattccatttttattatattcatttttccagtattataaatactgttatgatgaatatccatatacagaaatactcatgtgcgtttctgatgatttccttaagataaattcctgaaaatggaattaactggatcagaaggtatgaatgtttataaagctcttgattgcttgctagaaatggtaatatcaatttatacttctaccagtatagtctaggagggttctttgaacctttgctcacattgagggtgatcatttaaataatctttgccagtcacatagatgaaaaattttgcatcaaatctcttcattttgatcttaatccttttctgaccatgtgttcaaacttgaataattaaaagtcaaacagtaaacttgtaaggagagctgcttttacagaactaaaaaaattaataaaatctggaaaaaaatttttaaaggtaggcttctatattgtattttcaatatttcctatcatttccttgctagaaatggtaatatgagaaatggtgatcaagagctttataaacattcataccctctgatccagttaattccattttcaggaatttatcttaaggaaatcatcagaaatgcacatgaatatttctatatatggatattcatcataacagtatttgtaatactgaaaaaatgaatatagaaatggaatggataaattatgataaattatgataaatggataaattatgatttcctgtctttgatttagttcatttttctttatattttattaacttagtatatattttattaacttagtatatattttattaatttagattgagtaaagtcaatcaattttatcaacacattcatttttttgttttctgcttaattttataaaataacaatggcgaaattcaataaaatatcaaaatatttcataatgacattgtcaaaagtgaatttttgtttgtcaagcagcattcattgactggtgatattcctaaatgtttgttcatcacatgagatttaaaagcttgaatttggcatatcaaagataatttaggtgtcttatgtgggttttaccaaatttaatgcctgcttttgtcttattttaatttgaatttctctagttagcattgtaaataattttctctatgtttactgaccgtgtgtaatttttcaatctttgcacttttttttgtatcctttgatcattttcactttatttgcatattggactaagcgaagtcaaaagttaaatctgcatttctgtggagttcctacagctaatttatatctatggacagaatgaagtagaggaaattcaaaagttagcaggggtcaaacagtgtggactcttgtgactcagggtttgagttggaaaactagctcttccctttagtgactttgagtaagttatctactgtattgtccttcagtgtcctttatattgggggtattaagagtgcttacctcatggggttgttgtgaggattaaataagttaatataggtaaagcgcctgaaatagtacctgctgtagaaggctctctgtaagaggaagtttttttttttatattttaattaaattttctgtggctgggcgcagtggcttatgcttgtaatcccagcagtttgggaggccaagtcaggcggatcacaagatcaggagttcgagaccagcctgaccaacatggtgaaaccccatctctactaaaaatacaaaaattagccaggcatggctaaagttttttgtaggtacataatagatgtatatatttatgggttacatgagatactttcatacaggcatacaatgcataataattacatcagggtaaatggggtatccatctcctcaagcatttatcctttgtgttacaaacaacccaattatactcttttagttattttaaaatgtacaattaaatgatttttgactgtagtcattctgttgcactatcaaatgctaggtcttattctttctattttttttgtacccattaaccatccccagttcccttctcagcctctggtagccatctttctactctctatctccatgagttcagttgttttaatttttagctcccacaagtaggtgagaacatgcaaagtttatctttctgtgcctggcttatttcatgtaaaataatgacctccagttccatccatgttgttgcaaatgacaggatctcattccttttcatggcagaatgctactccattgtatatatgtactacattttctttacccatttgtctgctgacagacacctgggtgctcgcaaatcttagctcttgtgaatagtgctgtagtaaacatgggagtgcacatatctcttctatatactgatttcccttcttttgagtatatatctagcagtgggattgctggatcatgtggtagttctatttttagttttttggtagttttttttcaaactactctccatagtggttgtactaatttacattcccaccaacagtctgtgagggttcccttttctccacatcctcaccagcatttattattgcatgtctttggataaaagccattttaactgaggtgagatggtatctcattgtagttttgatttggatttctgtaatgaacgatggtgttgagagcttttcacataccaggctgccattgtatgtcttcttttgagaaatgtctattcaatttgtctatttttaaattggataattagatttttcctgtagagttgtttgagctccttatatattgtggttattaatcccttgtcacatgggtggtctacatacattttcttccattccatgggttgtctcttcactttgttgattgtttctgttgctgtgcagaagctttttaacttcatgtgatcccatttgtccatctttgctttggttgccctattaagaaatctttgcccagttcagtgttctggagagtttccccaatgttttattttagtcatttcatagtgtgacattttagatttaagtctttaatccatttttgatttgatttttgtatatggtgagagatagggtctagtttcattgttctgcatatggatgtccagttttcccagcaccatttgttgaaaagattctttcctcagtgtatgttcttggcaccattgtcaaaaatgagttcactgtagatgtatggatttatttctgggttttctgttctgttccagtggtctgtgtgtctgtttttatgccagtaccatgccattttggttactatagctctgtagtataatttgaagtcaggtaatgtgatacctccaattttgtcctttttgcttaggatatatttggctattctgagtctttcgttgctcatatacattttaggctaattttttccatttctgtgaaaaatgtcactgatattttgatagggattgcgttgaatctgtagattgctttgggtagtatggatgtttgaactattcttccaattcatgaacatgtaatatctttcccttttttgtgtgttctcttcaatgttttacatcagtgttttatagttttcattgtagagatctttcacttctttggttaactcctagatattttattttatttgtagctattgtaaatgggattacttttttgatttctttttcatattgttcactgttagcatatagaaatgctgctggttttttgtatgttgattttgtgtcctgcaactttactgaatttgtttgatcagttctgacagttttttggtagtctttaggtttttccaaatgtaagttcatctcatctgcaaacaagaataattagacgtcctcctttccaatttggatgccctttatttctttgtcttgtctgattgccctagttaggactattatgttgaatagcagtggtggtagtgggcatcattatcgtacttagaggaaaggcttgcaatatttctcaattcagtatgataatagctgtgggtctgttttatatgttgcttttgttatgttgaggtatgttccttctatacccagttgtttgagagtttttattatgaagcgttgttgaattttatcaaatcctttttcagcatcaaatgaaatgattatgtgtttttttttcttcattctgttaatatgatgtatcatagtgactgatttgcatatgttgaaccgtctttgcatctctgtgataaattctacttggtcatgataaatgatatttttaatgtgttgttgaattcagtttgctagtattttgctgaggattttcgcatcaatattcatcaagagatattggcctctaattttctttatttgatatgaatttgtctcattctggtatcagggtaatactggcctcgtagaatgagtttggaagtattctccttttttttttttttttttttttcccagaatagtttgaggaaaatgggtctagttctttaaatgtttggtaggattcagcagtgaagctattgggtcctgggcttttctttgctgggagactttattatggcttcaatctcgttacttgttattggtctgttcaggttttggatttcttcgtggttcaatcttggtggattgtgtgtgtttaggaatttatccatttcttctagattttcggatttattggcatatggttgctcatagtaaccactaatgatcctttgaattcctgtagtatcagtagtaatgtcttctttctcatctctaattttgtttatttggggtttctctcttttttcacagtctgggaaagtcttaccaattttatcttttcaaaaaactaacttttggtttgttgatcttttgtattttctttgtttcagtttcatttatttctgctctgatttttatttttattttatattaattttgggtttggtttgctcttgcttttctagttcttcaaggtttatcatttggttatttatttgaaatgtttcctcttttttcatgtaggtgcttttagctataaacttccctcttagtacagccgtcactgtatcacataggttttggtatgtgttttcattatcatttgtttcaagaaatttttaaatttccttgttgatctcttcattgacccactggccattcaggagcatattgtttaatttccatgtgtttgtatagtttccaaaattattcttgttttcgatttctagttttatttcattgtggtcagagaagattcttgatattatttcagttttttgaatgttttaagacttgttttgtgacctaacatatgatctaatctcgagaatgtttagatcattcatgctataatgatcagatcctctacatgctgaggaaaagaaagtgtattctgcaaccattgaatgaaatgttctctaaatatctattaggatcatttggtctgtagtaaagattaagtctgacgtttctttattgattttctgtctggaagatctgtccaatgatgaaagtggggtgttgaagtatccagctgctattttttttctctctcttttttttgagacagagtcttgctctgtcacccagggggcagtgcagtggcatgatctcagtacactgcaacctctgcctcccgggtttaagcgattctcgtgcctcagcctcccgagtagctgggattacaggcgtgcaccaccacgcctggctaattttttttgtattttagtagagacaggatacggggtttcaccatgttgtccaggctggtctcgaactcctgacctcaagtgatccgcctgcctcaggcatgtatatttacaattatcgtatccttttgctgaattgacccctttgtcattatataatgaccttctttgtttccatatttacaaccagtaaacaatacagtattaaatttgcaagtacaaaatttgttttgtttttggtgatatcttcttgtctgttttaaacactggtaagtagtttcttgtatctcagactaagtaccccatttttttcttatgctatatacctaaaggtaaaaacagcagtttttgtcagttactggttaataatattttattaattttgaagacataatatgttaaagctgtgtgaggaaaggcaaaagaatggcttggaattgtggagtgtctatcttaaaatattagggtttttggtattcttaactttaaccacaagaggtctccaaaggatttgatattttgtgaattactgtttaatggttactaaaatcttcacatttctttttatatctgaaagtacaggtttatttactttgtatcatattgtgacttagaacaaatattagagatgatagtaatctaaaattattactcctaaataatgatacactatcaatttttcttagattatttatttttatttatgtaaagtatgtttgtaagatttcagcctgtgtcttagggaatcagtcttactatcttgttacactttcttttgttgtaaaaatgtagagaaagaaacaaatggaaagcaatagtctcgagccctttatcaattgcagttaaggttgctttagcttagaaatgttgtatgtttatagaaatggttgagaggaaagctttagaaagcgataaacaaataatatttactagttctcaaggaaactgacttttcaggtgaatcaggtgaacatcacaaatgacactcaattttgcgttcaaagaaatgagagcttcctgagcactggcatagccaaggaaggctgtatgaaggaggtggggtaggctggtacatttgcagaatagaaggctttgagttggtaatggggaggggggaagggtatgttgtgtgtgtatggaaatgatatgaggtctgaggcacacaggctggaaatattagagaagtgtgaagacagaagggagatttctctgattagagggaactttcatgttgagaattgagaaagaaagggtgaaggcctatgaaatccagcaaactggtatggattcctgtagaaggcagtaaggtttctgggaaaaggaatggcatgatagaagggaagagatgagtgtactgcctagatgggacagttgaattttaaaaataaatatttccctaaaggaaaaagcggatacagagaaaagaatcagatcaaggagcttagagaatgccaatagttgggaataggagcaagaatacaaacagaaggggaggaattaaagagctaggtggagaaccaggacaaggtagggatgtgtagttataatttgtcacacgtggtataaccaatgatgtgagctaattttttacattattgactctgttatagtttactgaaactgtatgacattcagaaagatacttggttaaaaactagccttagctcattgatatcatttgaaaaagacatgtggaagaatgtcctgtggtaccacagtgactttagctatctgacctttgaaataaatgcttgaacacataagtgcttcctcaaagatagatgtgtatgctgcagatttaaagaaaacattgaaatcttaatgttggggaataagaataacctctactatgtttactttcagtgttagaaataccttattattatgtctttttggccacagagagccttacatcatctgaggtttaaccaaaagtattatctaacatgattctttatgcggaggcatagtaccacctgaatgtcacttatggtgacacgtgtttgaaattaccatagtagcattttcattttgtgttcatctcttattaaattaatttatatagtagaaatcacttattactttatgttattgtactttgactttcaagtttttaatggaaaatatttagcagagttttggtgccaaaatgaagtgataactgtgagactatataattatcagaggaattgttatgcaaattaggtatctgtgttatgactgaagtccaacttctttctaatgtcatttgaattaaacattagtataaaggtttcaatttttttttttttaaagaatgagagtaaaagaaacaacaggtcttactcattaatttggttaagaggaagtgcttcacacatacgaaatgttattaagtggtcggtacttgatggtaccaatttcgtgattgcagtgttacagttctatcaaagtttaataagctcaattctgtgggttcatatgaagtcatttcaatataattcttagatatttagagccaagtaaatgtggaatggcataccaaacagtgggtagcatatagatatgaataacatggtgcctaaattaggtgggaaggtgggactgggtagaaagagggcattccaggaagtgtggtcacaggatgagaaaagggaattgggaacatcgagttgactggagtgttaggaaaatatgggtcaagagtagcctgcaacagaatgtagtgcagaagagctgttcagtgagtatttgctgaatgattatgtttaaggccagagaggaagactggagctgtttcattgaggatgctggctgggcactagtgggaggagcttatactttatttagatgtttctcaaatttggcctaccaaccttttaatttactactttgtgttagaattttcttatttaaatttgttaaattataattttaaaatttacaaagttaatacatgtttgttgtaaaagtgaaaaaagtctattttaaaggaaaaaataattcttgctaacctcctcacccatttcacttaaattagttttattataatgtgacttaaatatttataaactgaaaacttagtgctctaggttttatacctattttaacaggaataaagtccaagcaaaatttgagattaaagtaaatgtatgaaacaaataaaatataaatgaatgattgtttggtatgaagggtgatgttctgctgctaaaaataaactgttcctaccagttcaaggggatatatccccaacggaagaccgagttctttttttttttttttgatctttattttattttattttattttgagcagtttgaggctcacagcaaagttgagagtaaggtacagaataaaagtgtcatatcatcagtattctccaccagatcctgtgctatgatattgctgtaatatgctgtgtaaaggctcaaacctttcctgcatgatttttttaaagagtaggggtctcgctctgctgtccaagctggattgcagtggtgcggtcatagctcattgcagccttgaactcctgggctcaagagatcctctcacttcagcctcctgagcagcatactaatcaggcacatacctgtagtcctggctactcaggcatgcaccaccccttacagctaattttttaaaaaaaattttgtagagatgggttctggctattttgcccaggctggtctcgaacttctggcctgaagtgatgctctcacctcagccttgcgagttcttggaattataggcatgagcgactgcatttagcatcttccagtctttttctttcttcaaaccacagtatgacttaagtggtttgccctccgttgggtaccagtgtaccagttccatttttgttgttgttgttgttgtttttgagaggaagtcttgctctgtcacccagactggagtgcagtggcacaatcttggctcactgcaacctctgcctcctgggttcaagcgattcttctgcctcagactccccagtagctgggattacaggcgcccgccaccacacccggctaatttttgtatttttgtagagacgtattttcgtaggggtttcgctgtgtaggtcaaactggtctcgaactcctgacctcaaatgatccgtccgccttggcctccaaattgctgggattacagacgtgagccactgcacctagccatccagttcaattttaaaactactgttttatttttctcattaaactttaaccgttaagtgctccttattactaatgtgatcttaaacataaacagaaatgcagaaactgaagcacgtagcaatattcattttaaaagctgataatccagttgatctaagaccttaacctaagatcatgaaatcagttcggtaggttgtgactaacattttaaaaaaatacagtagaagttaccagagtatatcacgtgtagtaagggtaagtatttcatgaaattcctttttttcagttttatctgtttatagataatctgtctgtatatgccttctaatcctctctccaattcctatcatgtttgtaattgtccatgaaaataattaaactcataatttaatatattaatatgattaataaatgttattcatagattattttatatatacattcttattacctgaaactgatcagatactgcccagaaatatatttttgaatagcacaactgaaaagtagttaatatttagactacgtatttaaaatcctaaagctgacatgattcacagaccagatattgcctacatagaaaatctagaagtgacaaattatcagaagtaataagaattcagcaatgccattaaatataagatcagtttataaaaatgaatagtgtttcagtacagcagcaacaaatagaaaatgaaaaaaattttaaaagatactatttaaaatagcaaccacaataatattatctaagactctatttaccaaaaagaaaataaggtcttaacgaaaatttggaaactttactgaaagatattaaagaactaaataaatactggaaagatgcaacacgttcatgaatggaaagattcagcataaagatatcagttctccttaatataaattcaatgcaattcttttttttttttaaataacaattttgtgagtacatagtagggtacaagagatgtttttcagtgcaattctaatcaaaagggcaatgaggtttttcacagaaactgacaagctgcttttaaaaagatagatcaaagggccaataataagtaagacagcactgaaagacttagagctatttgccctatcaaaactcaaaacttacatatatatgtgtgtgtatatatatatttatatatgtacatatatatgtttatatatttatataaatatatctaaatatatatgtatgtttatatagataaataaacatgtatatatttatatagctaaacatgtatgtttatatagataaacgtgtatatgtttatatagataaacatgtatatgtttatatagataaacatgtatatgtttatatagataaacatgtatatgtttatatagataaacatgtatatgtttagatagataaacatgtatatgtttagatagataaacagtatgtttagatagataaacatgtatatgtttagatagatagataaacatgtatatgtttagatagatagataaacatgtatatgtttagatagatagataaacatgtatatgtttagatagatagataaacatgtatatgtttagatagataaacatgtatatgtttagatagataaacatgtatatgtttagatagataaacatgtatatgtttagatagatagataaacatgtatatgttagatagatagataaacatgtatatgttagatagataaacatgtatatgtttagatagatagataaacatgtatatgtttagatagataaacatgtatatgtttagatagataaacatgtatatgtttagatagataaacatgtatatgtttagatagataaacatgtatatgtttagatagataaacatgtatatgtttagatagataaacatgtatatgtttagatagataaacatgtatatgtttagatagataaacatgtatatgtttatatagagagataaacatgtatatgtttatatagagagataaacatgtatatgtttatatagatgaatatatataaacatgtatatgtttatatatgtttatatagatatatatatacacatgtatatgtttatgtttatatagataaatatacatacacatgtatatgtttatatagataaatatacatacacatgtatatgtttagataaatatacatacacatgtatatgtttgataaatatacatacacatgtatatgtttagataaatatacatacacatgtatatgtttagataaatatacatgcacatgtatatgtttagataaatatacatgcacatgtatatgtttagataaatatacatgcacatgtatatgtttagataaatatacatgcacatgtatatgtttagataaatatacatgcacatgtatatgtttagataaatatacatgcacatgtatatgtttagataaatatacatgcacatgtatatgtttatatagataaatatacatgcacatgtatatgtttatatagataaatatacatgcacatgtatgtttatatagataaatatacatgcacatgtatatgtttatatagataaatatacatgcacatgtatatgtttatatagataaatatacatgcacatgtatatgtttatatagataaatatacatgcacatgtatatgtttatatagataaatatacatgcacatgtatatgtttatatagataaatatacatgcacatgtatatgtttatatagataaatatacatgcacatgtatatgtttatatagatatacatgcacatgtatatgtttatatagatatacatgcacatgtatatgtttatatagatatacatgcacatgtatatgtttatatagataaatatacatgcacatgtatatgtttatataaatatgcacatgtatatgtttatataaatatgcacatgtatatgtttatataaatatatatgcacatgtatgtgtttatataaatatatatgcacatgtatataaatatatataaacatacatatatacacacacacatatacacacacacacacacacacacacaaacacatatatatatatgttttttggagatgggagtctcactctgtcacccaggctggagtgcagtagcacaatcttggcccactgcaacctccatctcctgggttcaagtaattctcctgcctcagcctcccgagtagctgggactacaggcatgtgtcaccacgcctggctaatttttgcatatttttagtagagatggggtttcaccatagtgtccaggctgatctcgaactcctgacctcaaatgatcctcctgccttggcctcccaaagtgctgggattgcaggcatgagccaccatgcctggccaaaactcgaaacttataaagcaatggtaagttagtatggaattggcatatggagagagtagcaaatgaagcaatggagcagaagaaagatggagaaaacaaattcatgcatacataggaagttcatatggcagagatggcattagacatcctgggagggagggattattcaactgatgctgcagggacaaacagctttccatactgtaaaattaaaccctacttcagaccatacagaaaatttcagttggaaaatatatatgtattcattacctcaggatctgaaaagatatcctataaatgacatacacaaaaagcacaaatcaaaggaagtaattagtaagtcatgtagcttttttacaggttgctctaggtattacattatatatacataacttatcacagtgtacttgtgtcattgttttaccagtttgagtgaaatataaaaactttacctctgtctatgcttctttatcctcccccatttataatataattaccttaaatattataattgtcttaaatatttagaaagcgttataatttttccttgaaccatcacacataatttaggaaactcaggaggggttcctattgcttaccttgctgtttctttcctgatgttctaaggtttctttttttttattttttcctttttgtttagagaacttcctttaaccattcttttagagtagctctgcttgtgtcagagtctgttagtttttcatcatctgagaatgccttgatttgcctttcattttttggaagatattttttgccaggcatgggattctgggttgacaattattttttcagcacttgaaaaatattttgccacttccttctaacctttatggtttcagatgagaaatctactatcattcaaattgttttaccctatagctaaggtatgatttctttcttgctgctgtcaagaatttttttttttttttttttagtttttagaagtttaattatgtgtcatggaacatatatctttggctttatcctttttggggttcactcagcttcttgaatctgaaagttgatgtctcttgccaaatttgtgaatatttcatctattatttcttcaaggtttttgttgttggtggtggtgttttttttgttgtttttttttttttttgcctttcttttctcctcttgggactttgatcacaagaatgttagatcttttgttatagtccctggggctctattcattttatttttattgcagtctgtatcctctctgctttccagatttggtaatttctattgttctgtttttcatttcactgattgtttcatctgtttcctctattgtgctgttgagtgcatccactgttattatatttttcacttctaaaatttttgttcattttttctttttttttgagacagagttttgcttttgtgcccaggctggagtgcagtggcatgatctcagctcactgcaacctccgccccccgggttcaagcagttttcctgccttagcctccctagtagctggtattataggcgcctgccaccacgcccagctaatttttgtattttagtagagatggggtttcgccatgttggccacgctggtctcaagctcctgacctcaggagatccacccatcctagcctcccaaagtgctgggattacaggtgtgagccactgtgtccggcccatttttttgtttatgccttctattacgttgcagagaatttttccttgccttgactttctatttttccatttgtttcaagcatgtgtgtaattgctgttaaaacatttagcatggctgctctgaaagctttgccagttaattctgacatctctgttatcttggtgttggcatctatcgattgtcttttttcattcagttggaggtttggaggttttcctgttatttggtatgatgagtgatttttggttggaaccagtgcttttttgtattatgttgtgagattctgggtctcatttaagccttctgttctagctggctttccctgacactgcttcagcagggtaggggtgtgctgcctccttattgccaggtggaggtagaaacccaggttgcttggtttccgttgaaacccgagggagatgggtgcttcttgttactgctgggtccctggaggagttccagcttcccatgtggcctccactgggccttctctgacaccatccccgtaaggagtgagaagggagtctcagtactgcctagtgggtgtggaagtccagtctctgtctggtgtttcgcctgataccatgggggttaaagcctcagtattggccagcaaggatgaacctcttgtttgctactgtatggctgacactgacacaatcccaactggagtttggagtgccttctttcaccagtgagaatggaaatctggggtcccagcctttgctagcatgggtgggaccacaggtttttctctgatgcttggctagagtagagcggttattggctaaaagttttctgtcttgctaggcttcctcttctctgggggtttgttgaggcttttttgtctgtgcctgttggtctttccgggttgtcagctttttcagctccaagtctgggttttatgctacaaaaagtaaacctggggaactcaccgtcatactgttcctcacatcccaagttcactagctggtctgctttctgctcacctttcagagtcgtcttatgtttgtttgacatgtaatatgcagggagtggtacttagagtaggagtggggaaacatatctccattccttcttcccagaagcagaagttcttcaatcaagatcttattttagagattgctctatgtataaatgaactttgcttccttggtgttattttgatctaattataataaaatttggacttagattatattgataatgccagtgtgcaaattttaactgcaatagaattgaattttgcacatgggtgaatctgattgagaaaaagaaaatcctattttttataattaaaaaactgcttttaatatttttagtgctgtttacagtttaagaatgttagtatatttttaaaagcacaaccagtggggaaaattctatcccttttcttggcaaattaacaatctaagcatacaaaaatttataggaaaattttgccagctctccatcagagtgctgtcatgatgattagttcatatttccttcttacgaagcttgccctttcttgtttatcacccacagaaaagcatcaaagttaaaaattaaaagtatttgaaggaacctccataccaagtggattcagagagcccagaggtcagaaatcgtgcagagtcttatgttgacagaggaatggccctgccataagaaaggtgcctgagttatacaaggtgttggcagctggagccaagttacacctggtttacttacctgatataattttaagtgcttcacaaataacgttttttaccttcatagttaaatatttacttaaggtatattaaaaacatataatcagtgaatcaaacctgtgatttcataaatgtgttgcaaagaaagattcttaagttggtatttgagttaaaaatgtgagttaacttaacaagaactatcaggttatagtagtgatgtccttacaaatatgtcagtattattgaaggtaaaggggaatgactgaagttaaggaaacatgttggagcaattgtaaaggcaatgtgtgtcacattttctgccacttgtcatttagattgtgtaagctaaatctagtataagtgggaccattgtttgaatgaaaaaaaatccaaacttgagatgtagagaaatatagatgaatttgaagcccagaaaggacatttaagctctcttaagatgagttactccattttttatagtagctcacctttttaaaggtattttatcctgctgtcaagtttattttattaaattggataccaggaaattctaattgatttttttatatcaaacaaatcgatgttatttatttatttttgagacggggtctcactcttcctcaggctggagtatggtggcaccatcgtggttcactgtagccttgaccccccaggctcaagcaatcctcccacctcaacctcctgagtagctgggactgcaggtgtgctcaaccacacccagctaattttttttgtagagatgaggcctctctatgtcttctatactggttttaaactcctgggctcaagcaatccacccaccttggcctccccaaaatgttggaattacaagcgtggaccattgcgcctggccaaaatctgcattttgatggatgtttccagtagattctcaagttgttgatacatcttctaagttgaacattattatacagtcattcatttattcatccttaaacacagttattgagtggctgctgtgcgccagctttgttactaggtggcaaggatacagaaatgagaaagatccctcctttccaagttcttatagtctagaggggaggtagtcatggaaataattgtaatgaaagcgctggttgaaaatatcttagagttactggcagcccttgagcatcatgctagtttgctagaggggtgtgttagaattgagactggaagaatgaatgccagtcaggtggaggtgtgagagagcgtgcttttcttaggaagcagaaactagtttggctgggttactctgccagcatgagcaggcaacctgaggcaggacagacgtgttttggagagaaagggtgtataaagctggaaaccatcattctcagcaaactgtcgcaaggacaaaaaaccaaacaccgcatgttctcactcataggtgggaattgaacaatgagaacacttggacacaggaaggggaacctcacacaccggggggcctgttgtggggtggtgggggggacggatagcattaggagatatacctaatgtaaatgacaagttaatgggtgcagcataccaacatggcacatgtatacatatgtaacaaacctgcacgttgtgcacatgtaccctagaacttaaagtataataaaaatatacaaataaataaaaaataaaaagagaatcaagagtgaaacggtggagtgagaaagcggcattacacagggcctggataaagagtttcctgtgacagagactgagctgagatggctggtgatggggaccgtagcctagtgaccctttgtgtacccagcacctatcaaagtagctcacacataataggtgcttaataaatgcttggtaaatgaatgattaaataagtgatgtttagaataaagagaataatgggtatctcctatttgtttttcttaacaaaactgatttgggttttttaaacatagaagggttgttgtaaggctgggcgtggtggctcatacctgtaatcccagcactatgggaggacgagatgggtggatcacctgaggtcaggagttccagaccagcctggccaacatggtgaaaccccacctctactaaaggtacaaaaattagttgggtgtggtgtcagcacctgtaatcctagctacttgggaggctgaggcaggagaatggcttgaacccgggaggtggaggttgcagtgattcaagattgcaccactgcactccagcctgggcaacagagtacaacactgtctccaaaaaaaaaaaaaaaaaaaaaaaggttgttggagtagctggaaatctatacattaacatatatggtaatcaatgtctatttacattatatagatttacattatacagatgtagccaattcatttactcttttggaaagatcatattgatttcttatcgttttttccccattatgtttatttctttaaaaaattttttaatatcactgtaaattgattgaagcatcctgacatttccatagatattcctttacagcaaatattaatgggatctacatggctaagttactgtttaaagattgatattgatgataactaggcactagcctcccctctggcgcttgaaaccttttctgttgtggtattcgtaggaaatctctttttttctttatattttgtcttccccattttcctcattcctcttttcgagagcagaagataaatataaagttgactactttgtcattctgtttcattatgtttattagacggtagtttcacttaactatttagataatctagaattagaaaataaattgtgggcctggcagggtggctcatgcctaaaatccgagcactttgggaggctgaggcgggtggatcacttgaggtccggagttcaaggtcagcctggccaacatggtgaaacctcatctctactaaaaatacaaaaaattagctgggcatgatggcacgtgcctgtaatcccaccttctcaggaggctgaggcaggagaattgttcgaacctgggaggcagaggttgcagtgagtcgagatctccccactgcactccagtctgggcgacagaacaaatcaattctggtagtagagatggtagtgactaaatggaagaaataaatctcatatgctgtaggaaaatgtttgccactgggaaaccatttaaagaggaagtgttattagtattaaaaaatctgtcattttgaaatttctttttaaaaattacattaatttcttccctggtggtaatgccattgtattttcagtaggttttttttttagtcctgatactttttgtatatctagctagcaattttaatggatgtgcttaactcatgaaaatccagattttaaaacatgataagttaataggtgatagttattttataagaacatttgccatgagtttatttaaagaatgagagcttctttgtgcattttcatcaagtgcattctcctcaggaatatatctccttgaaaagaaaaaatggggtgtatttgcagtaggtttattgatagtcgaataggaagaaacagcatttgagaagtgtggagaaaagatcttcctgattactacagagacctcctaaagtggggccagactgcttgaacagaaagtttggaagcaattgtgtgaggtgtgctgcatttgttttactaattcgacttgatttttgtaaatacacctgttcatttgggtttgaggatttaattgcataaagactctttatttagctaaagcgtcttgtcctcatggcttttcccagaagtttgtgttataaatgttaatatattaaaagtgcttttaaatgatttattattagcatcttaaaaaaatcctacactaaatattaaagtagtctttattatttcaggtgaaggcaaagggaaacagtacgagttgcaaggtagggggtaaatggaaaggaagaaaaaggaaagacaggagatgaagggaaagattgagtcccatcattcttgaagacacattgttcatggcttcaataaccctggcacagccctctgaagaaagtgtagttatcctcttctttctgcaaggaggcagagatgctgtgaacctctcttgaagttacaggatcacttaggtagtaagtggcaaagcccactagagccctaaccctgtttgatactggtgagttcacctgctatcattaaggtgtaacctgacagcaatgtaaaagacaaaaatcccccttcactgaactccaaatacagttactgtctgtcctcaggatctctttatttttttcttctccttttcatggttcaaggagagatcccttttaatctcttcccttccagcaaagcttcctttcactttctacctgaagtcaaaaacttgaggccagcttagttcagagctcctctgggcttgcttatctcccagcctttgtggactccttcttgtccatttgtctttgtaatgacttcttcctgtcgaacctccctgctgaagggagacttcttactaatttctcttattttccctgcttgcttgctttgagattattttcttatctcttgttttcaggccaggaatttcttcctcctgccagcttttttgtgaatcctttttaacctctggcccaagtcttgatccctaaagcagtaaaagcctatggaggcctggtatggtttttctgtacagtttttcctccctcccttctttttctacccttctttctgaaaaaacaacagaaacaaaaaaaacccaaaaaccctctgatacttgattttgtatcaataatcaatatacattaatataaaatttattaatataaattgacttaatatacacaatactgagttttttccaggcttttgtggaagctccccactgcagtccagaatgctccgtgaccaggtcctaggattctttcccttggtgccattgtgactgctcccttattttataccttcagctctgtccagttctcttcttggcctggctgagctgggctctgcacctcatgggagtggacatgaatcctgaacacaccatgtgggtgtactgggttgtccccaaccttaatgtgaaggcaagtttagagaagaatgcatgatgagtgggcttgcatgcctccctgatggccatatgggagcatgaccacaccacagggttagtccttacctggtgggagccactgggagcagaggagtgctaggtatcgcatggcatatttaagatagtttgtgtccagccatgacatttcaagtgctcattaactgcatgtggttagtagctactgtataaggcaatgtagttttatagacagtagcacagctgtatgcaagagatgggcctagaaagacaggtaacacttaactagacagatttgggggaaaatacattcctcaatgaaagcaaagtttaaacaaggttgaaataatttatttaaaaaaaaaaatagctggctgggtgcagtggctcacgcctgtaatcccagtactttgggaggctgaggaaggtggatcgcttgagctcaggagtttgagaccagcctgggcatcatggtaaatccctgtctttactaaacatacaaaaattagctgcgcatgatggcaagcagctgtagtcccagctaattgggaggctgaggcaggagaatcacttgaacccgggtggctgaggtggcagtgagccgagatcatgccactgcactcctccctgggcgacagagcgagacaagcaacagcaacaaaacaaaaataaaaacagctaatgaagttcttattatgtacctggtacattctgccattactgaaattaactgatgtcatcttcacaacaatcctttgaggtgattacaattattatttaatatgtccataataaatgacaggtttaggaatgtacatttgaattgtggttctgactgaaacattgggcagttgaggaagtacttgataaagtgattagtgccctttttaagtgtgagcaatttctagttgctaagtcagggtatcatttatgtatgaattaccttataggtaagtatactttacattcttttatgtaactcctaactatcaacctccagatatcacaaagtttacttgtgggtgattaaattgcttaagacaagagattgcccacccatacagaatttctattgcttctgccttccagagaacagtgggagcagcctggcctgcaggttgattgtcagattctgcctccctcccacctacttattcctccagagagacacatagcttagcctcctgtcacactctgtcattttcctggggctgcagagcaaagggctccctcaggttaattctgaagtcctgtgtatgctgaagtctgcttgaagaaggagagaagcttccatcttgcatatttcctaatactttatctttccttctgtaacaacagtgcacagattttacttcaggaatgtgtttttattcactcctgctgttatcctgtatactaaagtagtcctttgtcaatgtgctgatgtgctctagaaacatataaagagttttttttttaattggtttgttgactggacgtaaacactagtataacactaaatctaagtgcagagagtgggcagcctgattttgttcataatctcaggggaatcttttataatgggccaggaagcacgtgtctgtggtttctgcatagggcgtgttctgtggtgcccagccagctgtagtatgtcctgcgagatttggcctgcaggccacaatggtgggcttctgggaggaagaatcttccttagaagtcctgccctttgacactccttctgctgaagtgtcctgatctcagtggggctccctgattttctgttccggggtctatcagcactgggtctatcagtgctacccacgccgccgtgactgtgggtcactgagggtgacctgcgtgggtcccatgggctcagcctggccttcccaggtcctacaaggtcctccttactgtccgtccctgctcagtcaccaaagaatgacttttttgaaagtacaattccagagttaaatactggctaagtgtagaaaacaatactggaattcagtcttcacctccaccagtcctcatggtgagatgaagtgtttatgggtttctttgttgtaacctcaaaagtggaatgcatttcctggttggtgctgcttgccctccaggtgcttagtgagtgaagcttcatcttccagatttctctttgtggcttagggtatctgtatgattttcctgcttttgttttcagaggtgctaggctgtgctgatctctctggagtgattatggtgctttttgcctggtaagcccatccttatgtgtaaaaatcaggatttagatgtgaggcaaataaggtggtggtgattttgttttacagagagattttcactttgcaaacttttagaccttttcaaattctaatttgatttgatgtatttaaataacaagttatgtaaaaacattgaaatgacccattttacagaagtttggtttacaaacccattgtttgtgtaaggtaacatacctgaggccaggagcatgatacctttcctctagtcttgcccttgtccctcgctttgggctccagctacatcagagtaattgccatgctcacaaccccatacagtgagagcacagaataatggtctgggtacagtctggggccagacagcctgtgtttggactctatttttcttactacctgtgaatcttaacctctccatggctcagtttccccattcaaaaacaagtatatgttgatagaacgttttatagagtagcaagcattaaatgagttaatacagtgcatgaaacatagtgctcattaaatattacctcctgttattcattcagcatttatttctctaccattcttaagctattctcacattgtgcaatgcatttttgtcacatctgtctttttaaatattctgtatactaacagtcttattgctttcatgaagctgccctacaatttccagttgaggttctaatcttagctgtacattgggattacatgtggattttaaaaaatgccgatgcctgagtttttggcctgtgctagagccgcttgtagctgcttgtaagaattgactgttatagttccaggactttgtaccagacggtgaaagcattggtaacttgaaatcaactatgttgggaatatttgcactcgtaattggcaaatactaccacagctctctcttcaatctgtttgatgttctagtgatttgtttataagcctgtctctctcaataggtgttgaccattttggtggaatgtattagtttgccagggctgctgtaacaaagtgccaccaactgagggcttaagcaacagaaattcattatttcatagttctggaggatagaagtaaaaatatcaaagtatgaacagtattggctccttcttgaggactgtgaaggaaggatctgttccaggcctctccttgacttgtagacggccacctccttcttacgtctcttcatatcgtctttcctccatgcatgtctctgtgtccatgttttccctttttacgtggacaccggtcatattggattagggcccaccctgatggcctcactttaactctctgcaaagaccctatcttcaaataaagtcacattatatactgagggtgtggacttccacatttgaatgttatagggacataattcaactcataacatagggcgaggacattcttttccacctccctcctcagtccgtttgtgcctgtggtagttgcacagtaaagatttgtagatttgaaaaggaaataccttttggctgatgttatttgtatatacttttttattcattgagctatgaactccagagttagtatggtttaaaaaaactttttttgttgttttgttttggaaacagctccttcttgggaaaataagagttagtatttctagagaaaaatgttagtttagaaagagtagttattttaggctaaggcagacctgagcttgttaatgaacttgtggactcaaaaggcgtatgattgagtgaagtggtcttgattttgtgtcagtggctgacaaaaagcttttaatcatgcatgaaaaaaatgtttgtgatgaatttccactgatttgaaaatgtcttaatgttgctagtcctcttcaggattatgtaagactgtagagttcttagaagagtatggcctttcttgctttttctcaaaggcaaatataatgtcaggtaattttgctgttatgctattgaaaaaatacctcctgagtcacaggaagcataaattattttttaaagatttaccatgtgttaggatgattgtgtcatatattaaatatataatggatgacatttagactattatcatctcgaagcatgtaaatatagaatatactttttgaagttagttttcttcaaaacgagagatatttctcaccattgctttttgctgagtaaataccagaattagaatcttatgccaaaaatatatttggagtacacatttgcacaggaatttgtttttttccagactttttaatagaaaatctttaggtataaattacatacggcaaatataaaaagttttatttttaatcaattttaatcaggtgtaatttatatgcaataaaatttatacattttaagtgtatgagtcaatcaattttgacagatacacacatcaatataactaccacccaaattaagatctagaacatttcatcttcccaaaacgttctctttgcctttttgcagtggttttctccccacctccacctcccactccaagcaactactgttctgatttctgtcactataggatagtttagactgttttagaatttcacataagtggagtcagtacagtgcatacttttttgtgtccagctcgttttactcagcataatgcctatgcaattcacccatgttgttgagtgtatcagtagttcattcctttttctcactcagttgtattgcatcatatgcatataccaacatttgtttatttacttgctgaacatttgggtttccagcttttggctattttcattaaagttactaacatttgtgtactagtcttctcacagatctatattttcattttcttcacataattaggagtggaattgctggattatgtgggtaagtatatgttcactgtataagaaacagccaggccaggcacagtggttcacacctataatcccagcactttgggaggccaaggtgggaggactgcttgagcccagaagcttgagaccagcctgggcaacatagtgagaccctggctctaaaaaaaaaaacaaaaaaaccccaaaaagccagatgtggtggcacaagcctgtaggcctagctactcagaaggctgaggtgaaaggatggcttgagcccccgaggttgaggcttcagtgagccataattgtgcccctgcactccagcctgggtgacagaacaagaccctgtctcaaaaaaacaaaacaaaaaagtaacagctgaagtaggttttggagtagtagttaatttaccctcctctcagcagtgtgtgagagctgtagttgctccacattcttgctgactcttgtcagtcttttaaactttagctattatagttagtgtatggtgtcatgttttatttttaacttgctttttcttgatgactagtgatgttttcatgtgcctattggttattcatttatgtatctcttttgcccattttgagacttggattacttgtattttttagttataagaattctttatacattctgaataaaaatcctttgtcagttataggtattgtgaatatttactcccagtgtatggcctgccttttaattttcctgattatgaccttggaacaacagaaggttttaatttggtgaagtcagatgcattagtgtcttcttttatggttactagtgctttttgtatcttaagaaatctttgcctactccaacatcatgaacattttctcatattttattttagttctatagttttagcttttaattttaatatattaaatagttggatttaactttggggcatcatgatatgaggcagggattgaggttcctttttctttgtacgtttaccagttgtttccacactgtttatagaaaagacttttatatgcattgaattatgttgatgccaaaggcttcattttgtctttgtttttaattaatatttatttatttattttttttagagacagggtctcgctttttcgcccaggctggagtgcattggcacgatcatagctctctgcatccttgaactcctgggcccaagtgatcctctcagccctgcaagtagttggggtacagattttcttgtggagatggagtctcacttatgttgcccaagctggtctcaaactcctggacttgatcaaaggttttgttttgaatttgactttgaaaaatgacctagatttttatgttcttatattagatattttagactttgactttctaggatgtcatttaaaaatgtttttaggtctccctttttcttttttctttttttgagacacagtctctgtcacccaggctggagtgtggtggcaggatcttgattcacttcaacctccgcctcctgggttctagcgattttcctgcctcaccgtctcgaatagctgggattacaggcgcccactaccatgtctggctaatttttgtattttcagtagagacagggtttcaccatgttggccaggctggtctcaaactcctgacttcaactgatctaccctccttggcctcccaaagtgctgggattacaggtgtgagccatggcactggaccctctttttcttttttttcagaagttattgtatttatcacataatagaaataaagggtgggatgggagctctagaaatctaccatttcagcttcttccttagtagacccacattagcgatgaatataaaatagatatgtgtgtgtgtgtgtgtgtgtgtgtgtgtgtgtgtaccctgagctaatggaatttgtggaacatttggtaaagctcataaatattgcacaactggtacaatcttaagtaatcaattctaagtttttagggccgggtgcggtggtggcttacgcctgtaatcccagcactttgggaggccaaggtgggcggatcacgaggtcaggagatcgagaccatcctggctaacatggtgaaactccgtctctactaaaaatacaaaaaattagcctagcgcagtggcgggtgcctgtagtcccagctactccggaggctgaggcaggagaatggtgtgaacccgggaggcggagcttgcagtgagctgagatcacgtgagatcgcgccactgcactccagcctgggcgacagagtgaaactccgtctcaaaaaaagaaaaaaagagtttttaacaacttttgttaatttttcttatgtttaataataattatagataagcttttctttacctttggttttctcatatttgaggactgcaatttaaatgatcttcaggaacttcttttcttcttgtattttgtgaaatgaaatgcttttaaaggcatttcaggcatcagaggtagatgaggtggtattttgggcagtggcagttgtttctgaaatcacacattagtagcttttcctatcctttatcttctgttcccctggagtgaaaaaggtgctgttggaggcaaaatttgtggctactgaaaatattccttaatgctggtagcttcttgacttcgtgcctttcttacccaattacatctattctaaagctgtcccacttcttttcctttgagcacatgactactgctatctatctcctattcttaaccagcattaattacactgtgtattagatactgttttaaaggctttatgtttgttgaccgacttaatcctcataaacacccttgtgaggttgctgctgttattttattacgggttttatagatgaggagactgaggctcagagatgttaagtagcttgtctaggttatacaattactaagtggcaaaactggaagttgatacagacttcctggctctaaagcacactatgtcatacagcctctcaggaaaaacacagaagggagcagctattcccttccttcacctttacttttgactgcaaaaggggtaatattttatagcacaattaaaattattttggttaatattttatgaaatttctttcccttataatgcatattacagtctgaatttctctctggtggtaaagtttctgacaaagcatctgtgcttaaaacaaagcagctttatttatgaaggtatttctttacaaaccacagccctggtatccagcagaaagcatgggttgtctttacatgtggttattcttctgggaaagcatcttagaggaggtgagccttgacctgcttgttaactgagaatatgtgcacaggtctggggtatagtatgtgtagattcgtggtaaaaagacttgggattgtgaggggctgaaagattacgaaaggataggggttttaaaatattattactaaggagttctgtccttagaaaagatttctaggatcaagaaccaagagctggacgatgatgacaacaggcagaaatgagtggcttctctcagcccttgacttctctgccattccctcccccttcgagtgttcccctttcctttggtttccaagttgcacgctgatcctcttagtgtttttaacctcattgcagacagaagtactttcccatcaggtttgccaagacagactagaatttttttgttagaattttacctttaaaaacaaaaccaaaaccaaccattacaaaagaagcaaaggtataatcaaaagtgtagaaaaaactagaaaaaaagttttagaacaacacgagtttacctagtatagactttctgccttatggtaatacctcctgtctctcttagccttttgaacagcccagctctcattgtgctagccttgagtctgaggccccatggagttcccatagtggggaaattctcaatcctcccttgctcccaaacaggcctctcctttgcggataggtcctggtgtgtttcttcacctcaggcctctttaagcctgaagaagcgtgggccctacatctgcttttagttttcagtcccttgtggtaagttggctaaggccctttcgcctctgttggtaaggaggggttttttgggcctccagaacctcccacaggtgctgtgtcttcctgttggctcattccgaggaggactcaccagctgactgtcaaactgggtcttcctcaccttggttcactgttggccatgtggacttcagtaggggctgccatccttctaagaagctatgcgattgtgtctatttccttctctggacagcaggagacccctttttgaagacagcacattttctttttttcttcttttttttcttttttttgacatggtgtctcattctgttgcccaggctggagtacaatggtgtcatctcggctcactgcaacctccgcctcctgggttcaagcgattctcctgccttagccccctgagtggctgggactacaggcctgcaccaccatacccagctatttttgtatttttagtagagacagggtttcaccatgtgggccaggctcgtgttgaactcctgacctcaagtgatccacctgtctcggcctcccacagtgctgggattacaggtgtgagccaccacgcccggccagcactacactttctaatgagtttttattgaaaaaaattttagttgaaaatgaagctgttggctcgtaagtgaaaagcttgaaggcaggctggaatcaggcatggctggaattgggcatggctggttgtaggggctctgctctttcctctcctcctgtgatggctgcctcctggtgttccacaaggtggcaggatgctccagtgctctgtcctgactcccagcctccagggttctagtccagggaagaggaccagcatctccttctgggagctcctgtataaatcctgtaatccattttttctcttctttctcttttctaatatgccattttattttttaataagttgtatattttagttcaaaaaatggaaagtattttaaaaagattatgaggtaaagagtttcttccatcctgtcccttttactattataaaaacacccttcattgtcctgttttaatggtttttattcgaattttatttttcctggtaataagatttgatctcatactttctttttatttgtattcacctaatatatacctctaggcagttgttgtttttcagccatctttttaatttgtaacctttctgaattactttgttttggattgcactcctatttgtagcatagaattttggggtttttttcccctctgtgatccaatctgaatttaattttcttttaataggtgaatttagccctttaatatgtcagatatatttgatattagtttatactattttgtgttatattttctatttttatatcttttaaataatctttcacgatgtgatctgttttctttgcatcttttttttttgttggttttgtcctggtggttggttttagaattataatttcaaataatgcccttagtcttctaagaaagtggtggttgttccctactgtgagcactgataaaattaatgagtttcatagtaattctaatatggagatattaaagccaggttaccttgtctgtcctactcagtcaagaaccctgtttcattctgtcttcagaggagagaatgaattactcggcttggaactcatcagtgctattattaccaatgagttcactgtcagagggggccttgtaagttttcccagaggatactgtccacctttaacaaggctctttttgtctatgagtttctaaagtcggtatagatcatgcaattggtaagctgacatttgtttgttcacagttgaacattagttcagagtctctgttggtggtctgttatttgatgccagagagtcaccagttttatttccaagcagacattaaaagatattattggttctgaagttcccttgttttaatgtgggctcaacacttgctgagagagcatttagtttttcaaaagcaatatggtaggcaacagagaggcatgttacatgtgaaaaggatttcttttttttaaaattagaagctttaatttaaccgtctagcttggcatgccctgtgtaatgactgagagaccgagatgactgtcttgttgtgagtcccaccaacaaggacagaagggaggttgccaccttgggaggagcacatcttctgttcatgctcctctccattcaggaggcttcagccccacagcacaaatagcctctgtagcggtcaagggaatgtggttttataattttttagatctgggtcaattatataatcatagataacttaatttttttgatgcagtggtatttactgtccacctctaataaagcaggtgaatcatagactaccattggatacatgtctttggagcagatttccatccatttttactccagtcctatggtggctaccggtattgttcttgtcgcctgctattcttaagtctgcagtttgcctgtgactcaccccaggaaacctgttgaaaatgctcgctctcctctaacttcctgctgaattcagatttagcacctttcgggtgggaatctgtacttctttgcaggtgactctgatgccggtgtcccacagactacagtttgaggaaatcaagactgacagttctgcaaggtttattaccctttaatttttcaaaaaataccttcagcaacagagaggcatgttacatatgaaaaggttaaagtagaaattttcctaaaatctatgtgacagaattctggtaggatgctaggcatgtgtgcagaatttcaaatagactttttttttttttttttttttttgagatggagtctcactctgtcacccaggctagagtgtggtggtgcaatcttggctcactgtaacctccgcctcccgggttcaagcgattctcctgcctcagcctcccgagtagctaggattataggtgcccaccatcacactcggctcatttttgtatttttagtagagacagggtttcaccatgttggccaggtaggtctggaactcctgacctcaggtgatccgccctcctgagcctcccaaagtgctgagattacaggtatgagccaccacgtctggcccaaatagacttttgtttcagagatacagtgatttgaatttatcataacgttctttaattaagaaatccaggaaaatagagataggagattttataactttaaccagtttgaaaaaatatttatgtgaagatggtttaatatacagattgcagaacgatgaatttaacattcttgtaaagcttccaggaaagcctcaaggataagtgacaagtccatttttatcaaacttaatgggtttctaaatccttatctgcttatcaaacaaaattttaattagaactgtaattgagtaaccagctgcctcttgtgttcactctaggaacttgtctaaaaacattgtggagctcatgtaaggtcattcgtttttgagttgctaaataaactttattgcagacttctaaaaatccaggtattgaggaagtctacaggaagataaaaattgataagaactttgcagtagttagtccgatactctctctctctagtggattaaggtagaaaaatccttcttcagcaccacagatgggagaatatcctccctcttaggtttcttcctgaatcagcttatgcctgcctaggcttgtagtagaacagataaagcctttggacctagctactcttggtttgaatatctgttaatctgttatctcttcattactttggacattgtacttaatgtctcaagttcaatttactcatttttaaaatgggaataatgccgcccacagcaaggagagccgtagttctggaacttgtactcattcattcctttattcagcactactttataggttgagtacctgttttatactaggcactgttccaggcattgaatacagcagaaataacactgacaaaagttcccatcctcatggatcctagtgagcagagccatttcacaccaggtgatcggggaaagtttcactgagatgatgacttgaatggagacctgaggaaggtgagggagtcagatcaccataaaaaattactttttaacattattattatttttctttactattttctgcttaatcctactagaaagtaagctctatgacagtggtgggtggggggtggtatttgttttgttagagaattttagatgtgctctgttgtattagtttgttcttgcactgctataaagaactacctgagactgggtaatttataaagaaaagaggtttaattggttcagggttccataggctgcacaggaagcatggctggggaggcctcaggaaacttacagtcgtggcagaaggtgaaggggaagcaggcaagtcctacatggctggagcaggaggaagagagagggggaggtgccatacactttcaaacaaccagatctcatgagaactcactcactatcacaagaacagcaagggggaagtccactcccatgatccagtcacctcccaccaggtccctgctccagcactggggattacaatttgatacgagatttgggcagggacacaaattccaaccatatcatatatggaagcacttttcctgatcacagaaatggggagctattgaaggagtcagagggcaagtgcaatgtcttcatctttagtgctctctctggcagcagtgtggtacaagggcttgaggggtaacgtgcagtaggcactccataaatgtctgctaagcatttttaaaagtgatcattctgccattcactatgagccataagagtagctggtagaaatgcctgtgaatgtttaaaagcattatatagactctatttcagaattgtgttgactaataaaaaatgctagttttccctaccccacacctatctttcaactgctttatatttatttctttattagatagaaaattcctcagtaaacttttatttagagtaattcctctttatgatttttttgttctaaaggtcgattcttaaaagaaaacttgttgaagtgctctaaatggaagtctttttttttatttctctcctgtgtcttttatgatagtatctgacaactatcttttttttgtttttgcagagattgggttttgctctgttgccaggcttgtctcaaactcctggcctcaagcgatcctcctgccacagcctcctgagtagctgtgattacgggtgtgagccactgtgcctaacaccttttttgagaaacttatatttttttacatatttattcttgattcataatatttatacatatttatggggtacatgtgatattttcatatgtgtatacaatgtataattataaaatcaggtgtttaggatacctgtcacctcagacacaacatttctttatgtcagacatttaatatcttctagctattttgaaatatatgataaactattgataactgtagtcctaccctactgtgctatcaaacactagaacttattccttctatctaactgtatgcttgtacccattaaccagcttctcattacctccctccccaaagctctggtaaccattattctacctctatgagatcaacttttttagctcccacatttgagtgagaacatgtgatattcgtcttttggtacctggcttattttacctaacataatgacctcagttccatccatgttactgcaaaggacagggtttcattttttggggggggctgaatagtattccattgtgtgtatattccacattttcattatctgttcatccattgatggacacttaggctgagtccataacttggctgttgagaatagtgctgcagtaaatgtaagaatgcagatatctttttgacatactgagtttgtttcctttgaatgtatacccagtagtgagattgctggatcatgtaatagttctatttttattataaaaaattcttttaagagagggtgtcttgccctgtcacccaggctggaatgcgatggcataatcatagctcgttgcagcctggaactgcttggttcaagagatccttcccacctcagccgcctgagtagctgggactacaagtgcactccaccatgcccagctaatttatattattttttttagagacaggctatgttgcctaggctggtctcaaactcctggcctcaagctttagcttcccaagtagttgggtctataggtgtgagccatcctgcccagctagtaggtctattttaagttttttaaggaacctccatactattttctataagggctgtctcagtttacattcccaccaacagttatgtaagagttcacgcctctctgtgtcctgaccaacactttttgtctttgtgacaatagccattctaacaggaatgaggtaaatatgtcattgtggttttgatttgtattttcctgatgattaatgagagcattttttttttcatatattggccattctttcagggcctttgcccatttttaaatttggttatttgtgtttttggtattgggttgtttgagtttcctatatcaaaatacttctaaattcagcgtgatgatggaacattggtagttgcttatgagataaaacagactcttggattaaagtaaaaagtaaaagtttcagaagtaatttaattttcggagaagccagtaaaattggaatcatttgtgttttatttgaaaaaattaaaatatggtacaaatataagaatataatacagatatagaagaaggctgctgaaaccaccatctagtccaggatatagagttttggcagtcactctagaagctctctctgcctcctcactgtcatagccctcagaggaatcatgatcctgactttgtcattgttatcaccttcttaatttcctttgcagttttgtcacccaagtatgtatccttatggtttaattttgccagtttattttttaaatgtcttcaaaatttttaaaatttatatttttagagacaaaggtcttgctatgttgcgcaggtgagttgggaactcctgggctcaagtgatcccccttctcagctccctgagtagctgggactacaggtgcataccactgtgtctgactttttataaaaatacgttttaaacctctttatctacaggttccctctccatctctttttattcctatcctcacctttggttttttttttttttttttgaagaaactcagttgtttttcttgtggagttttccaaagtctggattttgctgattacatatccatagagtttaagatattcctctgtattttctgtaaattggtagttgaattgagaggcttaataaaattcaggttttttttttttcatagaagaggaagagaactttgtagattctattttttcattgggaggcatataattatctctctttttgtgaattgagtagccattgatactcagtagtgatgaacaagtcttgctttttaaagtatcattatgaacccaagggcctaatgtattttggcttcattgcagttgttattcttcccagtgctcaaaatggcccattattgggcaaagagagtctctccaagttgacctctgtgccattttgccatgatgctagtaatctttagtagcttttttgtgtaacaagttagtctaggatcatcttaaacattttcagtcccagacctggaattagtcatttctccagtaatccttccctagtttcttttagtaggaaatggtatttttttttttttttctgagacggagtcttactctgtcgccaggctggagtacagtggtgcgatctcggctcagtgcaacccccgcctcccaggttcaagcgattctcctgcctcagccgcctgaatagctgggactacaggcgcgtgccaccacacccagctaatttttatatttttagtagagatggggtttcatcgtgttggccaggaaggtctcaatctcttgacctcgtgatccacccacctcggcctcccaaagtgctgggattacaggcatgagccactgtacccggccaggaaatggtatttctaaaccacattctgtgcaactagggaggctatttattggataggtcaaactatattaagaactcattaaaaaatacttctgattcaaattcagggctaaagagtttttatttaactttttcagtctgacatctatatctccttttccccaccatgtcgacaatcctggttcttatgtaagtactctgattttatcattcaaatatcaggtatttaatttgctttatcccacattactgaatctatgttattaaaattatatattataaaatgccattgcatttaaaggtcttacgtttcttccccatttatttcacagttgtaatatatctgcatcatcagagcatatagccattaggtactataccttctttcttatagcctccattgagagtcttagttctccaaacaaatatgtattacatgctcaccaccaattcttatatccatgtctttctagtcattttggttgtctgaaatttattctgtagtatggttgttcttacaccttagtgtgcatcagaattacctggcaggcttgttaaagcgccgagtactgggcctcactggcaggttctctggctcagtacatgtgggatggggcctgagaatctgtgtttctaacaagtccccaggtggtggtgatgctactggtctggtgaccatactttgggtatagctctctgtggcctttatacatggaagattggctaagcttaaaattcctggcttacagtttatttctttgagtatcttaaatacattactctattgtctgtagggtaaaacattgcggttaaagtttggcaactctgtttttctttcttttataaacaacttgtcattttggctggaaataattttactagattacttactgtgatggtcattatgggttgatttccccaggtatgtgatgtgttttttaaatatacagtgtcaagtgatttttctgtttctttgctttgccctctttgccaactttgtaccttgggggcaccttttatacacgttttaggtcttctttgccaaccttttgtatttgttactttctttcaatctttcaaatctcctctttcatttctttttgactttgaaaaaaatttccccctttcatttcctgcttcttatctttattatctgtagtatttattcagttgtgtgccttctagactatcgttcattctgagaagttttccttttgtctctaattcctgagttctgcccgttgatttctgagtttttctaaatccaatttgttttcttaataatttttttaacttgttagggttttcatgttttatggagatatctaacatgattctgttgtctgtagagatgttattatgttttttctttttttttcttatcataactttggacaggatttgagttgggtccttttctattactcatttttatgcaaattcattttcccaaacttttagaagaggcatgggttcaaaatagcttttctgacttcacagttctggtagtgttttttaactccaagtattatttataaacagttcatttttaagtgtacagtttacacaactgtaagtgtaagtggtagttttacacaattttgtaaccactatcacagtcgagatgtggaagaatacttttaccctaaaactttccatgtgcttttgcagttggtcccctcccttcacatctggccctaggcaattattaattttccaccagtatattttaccttttacagaatttcaaatacaggatatcttacaatatatattaaaattttttggcttgatttctttcacaaaatatgattttttgaggttcattttgctgcatattgtcaaagtatttgaaaatgtgacagctcattttctcctggctctgttctgtagtacttttgtctttttaacaattaccctgttatccttttctccccattttagattctgttcataggagtttttcctcagggtaagatttgtcctaaaaaagtgctttgcatcactggttttgtgaattcatagggcctagagttctcaagccccttcaggctttactgtggactccttgtagtcactattatcaaatatacaaactgcactcccaatttcagctcctcaaaatgtcctactgtgctttccagtgagtacctcgttgctgttttgtgttgtttctgttttccgattgttagagttctgttgcttttgtctgcttcttctcacatggttgctgatagcatttgtatcttattgttcatcccacctgcttgcattttggggttcttaatatcttgagatgcagttatagtgtagtacatgttatctgtgggttttagtttggttattaaagtctctttttatggcaggatttagggagactgaaaaactatgcttgaatctaacaaaaaacaacaattatttcaataaaatattatatcaaggaaaatagcaaaaaattacaaatgtgtgttacattgataaaatgatacatttatttctacttttcataatattgagggagggagtgttctgcttttgtgacgaggtatagccatttgtgtttctgtgttttctgtatcttttacatatgtctaccacattactgtctgttgtcttagattgtaaactaagaaacagtgattgttgtgtggcatatgcccatgagaatttgtttaactgtttttgtgaagaaaaaaaatatataaactatagattttctgtcataaatccttctttctgaattttaacctaattgtaaagcaaaataggtaataaagtttcactattgtttatttattacaaggcattgtaattgaacttttaaatcaactcatacgatctccttgctcaggaaggaaaatcataaaaatagaaaaaagcttgctttattttggtgctggggatggtttcaagtcttttttcagttttatgtagagaccaagaaagtgttctgcatagggagccaaagaaaaaaatattgagaaactttctaaagtatcttaactcagttgtttatagtatagctttactttacagataacttttgatgttcttagatcattagatatacctacatcaatatacataagataagcttccaaaggaaatactctttgctttgggaatactctttcctatcatctactaattttcattatagcagcagtcttttatttgtataggtcagtggttctttaactttaatgtgcagtagagtcccctgatgctgggccgggccccacccaacacctgttcctgtttcagataaagaccagagagaggtatgtgtacgtatctaagagtgagcacaaccaaagctgtataaaaccttcatggaggaaattacagaacattactgttggatataatagacatgaatagaagaatataccagctttgataatgtgatacctctatttaagatgttatttctctctaaattaattcattacatatcaaattaaaataccaataagggctgggcgcaatggctcacgcccataatcccagcactttgggaggccgaggtgggcagatcgcttgagtccaggagtttgacaccagcctgggcaacatggcgaaaccctgtatctactaaaaatacaaaaaaattagctgggcgtggtaatgcctatctgtagtcctagctacttggggctgatgaaggaggattgcttcagcctgggaggtcgatgatgctgcaatgagccctggtccagcctaggcgacggagtgaaactctgtctaaaaataaataaataaataaataaataaataaataaataaagtaatcccagtaagtttcttgtgaagaccgaaggtaagtgaacctaaaattcacaaagaaaatcaaagggccaggagtagccaagacaatcttgaagagcaaggtagggaccttgccactttagatatagatgccaagccctagaaattaagagactgtggtcgtgatacagagatagacaaaaagaccagtggaacagcatggagaatccaaaaacatatatagaaatgcaatatgcagtgaaagtaacattataaatcatcagggacgtatggaatgctaattgctgctttgatcattaattatatggaaaatgaaattgtatttataacttcacactatccacaaagataaattctggtgaataaattcagaaagcagatcttaaatttattagaaaatataagaaataataaaatacttagctgctgttaaaatgtaaaaagcacatgtatcttcatgtataaatcttagaaatagtgtaacattgaggataaaatcaatttgtatggttatgataaagtaccactcatacaaaatgaaaagcatgaaatgatacagttttttataaaacatgaaaacatgcatggtaatatacatcacattcaagataatgtttgcttcttttattaatttttttttttaatttgagacgatgtttcactcttgctcaggctggagtgcagtggtgtgatcacagctcattgcagccttgactccctgggctcaagtgatcctcccacctcagccttccaagtagctgggactacaggcatgtgctaccgtgcctggctaatttttgtattttttgtagagagagccatgttgcccaggctggtcttaaactcctgagctcaggcagtcctcctgcctcggcctcccaaagtgctgggattacaggcattaagccaccgtgcccggccagcgtttccttctggaaatcgtagagggatgtgattagtgagggatatgtgcaggctacaactgtaactaaagttttatatttttaaataaaaatgttttaaagcaacatgtgacaaaacattaacaccaaatgaatatcaaacaacaaagaaatagttgaagaaattgtggcatctatatactatgaaatatttttcagccattaaaaagaaggagttgtagctaggtcatttttatggagggactttcaagaattattaagtgaagagaacaagacacagaaatatgtttataaaatcatctcagttttataatgtagtaatatataatgagcatatattatatatgcttgtgtatgaccaaaatatgaacatgaaaaaatatggaaagattcattctaggctgttaacatgagagataacagtcatgggagtgagatgataaagaaagaagagaaggaggacagaatagggagtcaaaaaacatagaaaaagaaaatgcattacccagcatgcatgctatgattttgtttatgtacttaggcaaatttttatacatatttttaggaggactgtagaatcactttaaagagtgagagttaacctaatttactatatttgactggagactgtgatagaaacagatttagcagaaagtccctcaaagaaagagttactcagtgctgtattctgttgctagattatttaaacaaataacgtaatcaaatcaaaatgatgcttttcagtttttctctcttcatatttagtaacataatggaccctaatttcaatgagtttttctttttaaataatgatagatataaaatactcacaatgtgctaggtgatataaaatagcagttaataaaaagtacttggccaggcgcagtggctcacgcctgtaatcccagcactttgggaggccgaggtgggcggatcacaatgtcaggagatcgagaccatcctggctaacacggtgaaaccccctctctactaaaaatacaaaaaattagctgggcgtgatggcgggcacctgtagcttcagctactcgggaggctgaggcaggagaatgatgtgaacccaggaggtggagcttgcagtgagctgagattgctgccactgcactccagcctgggcaacagagcgagactccatctcaaaaaaaaaaaaaaaaaaagataataaaaaaattaaaaagtactcattttaatattttatgaaatagagcattttggcagagaaactttagctctttctttctctctctttcttcaacttgggaaagaataaggaataaatctttatcttttttttttcctcttctggccaagacctaaataccagcatttcatgataatggataagttatctttgaaattttccttttttctttcagtgtgcaggatgacagaattcgagtcgaaaggatggataacatttattttgaatacagccatgctttccaggcagttacagagttttatgcaaaagatacagttgacatcaaaggtaaatattttccctgtatgtcctcaagttgaactgatttgaaatttggataaaggtattagtatgattctcaatttaatgatgactaggtagttattataaatatgtgggagaagaagagctcactgttgttgtgctcatcagaaacactattgtactgcagtcccagctactggttagactgaggtaggggaggatcgcctgagcccaggagttcgaggcagcaatgagctattatcatgccattgcagtccagccggggcaacaaagcgagatcctgtctgttaaaaaacaaaaagaaccattgcagcctcttttgaaattatgaccagctagtaagttgatggttttgacatattcatcagagtggaaggagttttgaccatctttcctttttgcttatctttaaagatggctcattagtatctttgtattttatagactgtttggatgataaatattctgatgaagactagcattttgaaaggttggttgccaaaattaaaacaccagaatctagtgacaggtcgaaatattttaggtaatcattatttgtctaattcacatgtccacaatcaggcattaatgtttactttcatttgtacctcacattcctgccagtccagcttatgttagggtccattttgtggatggtgaggtgaatagacattttccctcttggcataaacttggcttcactctaatcttcatcctactccatatggaggaaatttatctctgtcacatgctagagagtgttcatcatcagctccccatcactgctccatttaagcatcagtgtctagttagcatttccttgcatctaggcatcagtgtcttgttagcatgtctctttaatttcatgatgccttggtcaaataaagtgtctgagcgtgtatcccacttctttttatttttttctgtaaggtctcactctgtcacccaggccggagtacagtggtgcaatcttagcccactgcaacctctgtctcttggactcaagcagtcctcccacgtcagcctcccaagtagctgagactacaggcgtgcgccaccacacccagctaatttttgtattttttttgtagaggtggggttttgccatgttgcctaggctggtcttgaactcctgggctcaaacgatcctcccacctcagtctgccaaagttgctgggattacaggcatgagccactgcgcccagccaagtgtatcccacttctaacaccagtgttcagtattaccgagaggtcatcttatgttcaactaaagacctgataaatcttaagactaccatgacctatccgtggtaccagatttacttaaaagatatgggccagaaaacacaccttacaagcagagcatgtgttgctcttagtgggatagtcctcacagcagactttgtggcagtgcccgggagagtgtatgaaggaaggagactcacatcaagtgagcgtaagcgccaccctggcttagaagctccaggcccttgaggagcctgtatttcttgctgcagtctctacaaaagacacgccagttgacaaaagtcaacgcactaagggaaggccaaaactctgtagtcaggtatttataattcttctcagtccagatgtaatttactgatatttggtcatttttaccacaggcagtgctacttctaacacattgatacaccatctttgtcatgttttctggggaagaaagctagaaagttaaaagaaaatcaatttctcagtggaacggaaaggtgttgttagcacttcatttacactctggttttataaacacctatagttaaaattaataagatattttactgatttgtagagaacatcttgtaatatatgtttttttacttctaaaagtaattaatgcttattgcaagaaagtcaaacagtgtagtcgtatataaggaaaaaagtaaagtgcctgccctcaaacttgtcctctgcccttgcagcttatatgtcggaggggttatcattaacaatttggcatatatccttgtgtaaaactccacacatacacacataaacatacacatatagttctctgtatttgtttaacataactgggatttattcgttcagctaattttttgaatgcctattatatgccaggcattgggcatacaataaggaataaaacagacaaaaattcctgctcttttggagtttacattctaatggtgagagatgtacaataaagtaaactagtgtgttagaaggtgataagtgctatgaaaaaaataaggcaggggagtgggttgaacttttaaataggatggtaaaggaaggcctcactgagaaacagcacttgaacgaagatttgaatagagactgaaggagttaaggaaaagagccatatagacatatgaaggaacagtatttcaagcagagacaacagtaagtacaaaatatcttaagtaggagagtgcttggcatgtttaaggaatagcaagtagtctgtgtgctggaacagagtaactgatggggagaacattaggtgagctcagaaataaagaggagatggcaggcagtatagggtcactttaagggctttgacctctactcttaatgagttgggggatgttggaggacttttgagcaaaatagtctaatgatctgatatacattttaaaaagaattcctctggctgctctgttaagaataccctgtagggtgcaaggatgaagcagtgagaccagatggaaagctgttgcagtgtttgtggtgagacatgaaattgatcagacaacttttttccctcacttagcaacatgttatagatggccttccatatcagtgcagataattggaagtcattccatttagttggtacataataaccaggatttacccaactttatttaagtactacgctgttaatgtttatttaggtggtctctagtttttttttaatactccaaaagatgttttaagtcaccttctggtacacacatccttgacatgcagtttggagtatttctagacaaaggggatgggcattttacattttgaaaaaacaacctgttcttcaaaaaaggttcattccaccatcagaaaaatgccctttttttccatgccctgggtattagtaatgatttacatttttccaaaggtcaattttaggagatattgtccaaattattattttggtaaccattaagttttacttaaaatttgtgtttaataatgctaacaagttaatggttctgtttattacattttttaatttgattaatttaaaagaatttttataacaagttaatatattctgttttctaggttctcaaattatttctggcattgttaacttagagaagcctgtgatttgctctttggctgccatcataaaatacctcaaagaattcaacttggaaaagatgctctccaaacctgagtaagtgattcctccaaaattaaaaaaagggggagcttatattatgaacatttcttaaattgaatttggtagtactatacttagagaagcttgcctgctattgatagaatactagggtgcaaggatgagctgtttggtattgttgctgaagaatattaaaaatatattggctgggcacggtggctcatgcctgtaatcccagcactttgggaggccgaggcgggcagatcatgaggtcaggagatcgagaccatcctggctaacatggtgaaaccccgtctctactaaaaatacaaaaaattagccgggcgtggtggtgggcgcctgtagtcccagctactagggaggctgagacaggagaatggcgtgaacccagggaggtggagcctgcagtcagcccagatcccaccactgcactccagcctgggcgacagcgagactccgtcccaaaaaaaaaaaaaaaaatgtgtgtgtgtgtgtgtgtgtgtgtgtgtgtatatatatatatatatataaagaattctgtcaaataaattgtattcatgatagctatttgatatattatagttttgactacaaaactgtgctttatactaactggacccagaaatagtattaaaaagcattcataaaaatttaccacctttcttattcttggtttcagttcttatttcatagaccatgaagttagagataaaagggccagctgctaacacagctttttacaagagtgattaactgtggattttggaaatttaaaagctcacaattgacattctaggaaaatactagtttgataaccattggaatagaaaaaagtagtagggtactttccttgtctttttatattccgccttcaccagccccttgtctttgggtctgtcaagaatcaccctccattatattgatccagggtgcatcagctctgtcccattctgcacaagtgggaggggagataggtgctatctcagcaaaatgacagaatagaaattaactaggaaacaaggaggtggtgctggttcaaggttgctggagagagtcaaagaaaggcaggttccttggggttctttttgtaatgtctttgatgtgcgttctcccgtgtggtactagaacagagtatcatttctctggaagcaactttatcctatttaaaagcaatctaaatgcccatcagggatccttgtgctatattcatgcaatgtaatgttatatagcagtgaaaatgaatgaactagagctattaatatatgaccaatgcttaaaatttcatgaacagtatattaagccaaaaataaagttgctgaaggccacgtagtacataccattatatgaagttagaaacatgtgaaatcgtactctgtactgcttaagaatatatatgtagttagagaataagtgaagacatgcaggggagtgatagaaaattcagaagcagggtttcttccagggggaagaagggaaagtagtaaaggttggggatggacgtggcatagtggagttctaactgatgtttcatttctgaatgtgggtattgtattaatctatacattttttagtgtggccaaaatgttttattttaaaaagtgtcagcccggcattataccctcattggattctactttaagctccaaaaataaacttattaaagagatcaatctgtatggttggttgtgttggggctttgtaaaaaaaggggtgacaagatacctaccagtttgacttgttcatgatagggaccctgtaagtgaggtacaattagtgataaatagcttgcccattaagacttgtgtttgtgttcctgtatcaccaagcaaagaagtattaatgttgggataaggaaactaacttagaaatcaggccctgatgtgtttagaagcaaatgaatttggacctggaaagatgtgtcctcctcatatatatatatatatatttttttttttttctttttttttttttagatggagtcttgttctgttgcccaggctggagtatagtggtgcgatctcagctcactgcaacttccgcctcctgggttcaagcaattctcctgcctccacctcccaagtagctgggattacaggtgcacgccaccgcgcccagctaattttttgtatttttagtagagacagggtttcaccatgttggccaggctggtcttaaactcctggcctcaagtgatctgcccacttggcctcccaaagtgctgggattacaggtgtgagccaccgtgtccggcctgtcttcctcatatttaattcgaaataagaataataccaaacaataaaacaagatgtctatatatactgaaattaaaatagattcttttcaaattacctgaagtaacctcttgataaactgaagctgaactttttgcatctcataattgatggtggaggatggtcaggaaactggctctgctagtgacttagtgtatcatctaatctacctgttgggtacttccatggagccaaagccaaaagacataaagtgctctgctttgtatatattcccagcatccagcataagcccagcacctagtaggcttttattatatattattatatatagtattaatataggattaatgaaagaaggaaggaattcttcattctgtgagggtatatttcattggaaattgccaaaaggtcattggaaaccaagattaataaagatagtgatcaaactggtactctagttttgcttaaaaacgaaatgtggtgttcatgagtggcatgtaatttgaagatcattctaaaagagtaattctgtagtgcttatattttgcaaaaataatgttgcttcttaaggtgattactttggaaaaatgaatattctccttgtagatgaaaaattcagttgcattattttataaacatactttatgctgctgaagttttggacttttatttacaaagctatgttatcaaggggaaaataaatttcacttgagttgacttgtttagtaaatgctttcacaaacgttgctgcatatttcataaaaatcatgatatacgtttatttaaaggtccttgtgccattagaatagaattttagatagtttgagaaaatataccatttcagaaattattcttaaggatgatttaagtgaagttttgttaagacacacttgaggttctaaagttattttgagagtttaagtttgtttcaaagaaaaatagtgtaacaaaataaatagaatgtgagggatattatttattataacagaattaacctgatgcctaaatttatgaaattcagaggaatccactttttgttgttagaaatgaatgcttttgtcattttggatggtttttattaagattggagtggtcacaacttcaaaaagatattggaaattttaggaaagagtgagaaaatccacccaagataaactgtaaaaccttttttttaaaagaaaacttcttatgataacagaatgataacatgtggtgattacctttacttactagtgaaagaaatagcttaatatataagctactctcatgacatctaatggctagcagccagggatgctgctaaacatcctaaaatgcacaggatatttccctaaaaaacacattatttggctccaaatttcaacactccaaaaccaaacaaatatattacaggaaaagaaactacagaccagtatcttttgattataggcacaaaaatcctcaatgaaatataagtacatggaatcaggaatataaaaacgattgtactccatgactattggatttatttcgggtatactggcttggtttaaaaatctggaagccaatcaatgtaatctaccttatcaaaaactacatgatagtctcaatagacaggaaaaactctgcataagattcaacaccccttcatgataaaaaacgctcaaaaaactacaactaacgtggaactttcttgacctgacaaaggacatttatgaaaacctcacagacattaaacctgtctgttgttgttaagatgcagtattgctcagatcagtctctaagttcagtgcaatttgtatcaaatcccagctggcttccttggagaaattgacaagctgatcctaaaattcataggattcatatctctgtttcaaaacttactacaaagtgagtaatcaagacagtgtggagggtgggattaaaaaaagacagtgtggaattggcataagcacagacatgtgatcaatgtgatagaattcagagtctggaaataaacttatggtcatttgattactgacaggggtgttaagacaattcagtggagaaagaatagatttttttcaaacaaatggtgccaagataactgtctgtgcaagagaatgaagttggacccttacttcatgtcatatttgagtttggaagataaaatggaccaaagacctgatatgagttaacactgttatactcttagaagaaaacataggtgtaaatctttgtaaccttgaatgaggcaatgatttcttaactatgacatcaaaaacacaagtgagaaaagcaaaaatagatacattggacttcatcaaagtaaaagcttttattcttcaaagaacaccatcaagaaagtgaaaagacaatccactgaatagaagaatttttgtaaatcatatatccagtaagggacttgtatctagaatatatatatatatataaactcttacaagtcaatggtaaaaagataactcagaaaatggacaaatgatccatacaggtttttctccaaaggatatatgcaaacaaccaagaagcacgtgaaaatatgctcaacatcattaagcatcaggtaaattcaaatcaatgccacagttagataacacttcatactcactaggatggctataactaggaaaaaaaaaggtgttggctgggatgcagacaacttgaaatcctcatacattgccaataggactataaaatggtacagccattttggaaaacagtctggtagtacctcatgacattcactgtgtgatccagcaattccactagatgttacttaagacaaggaaaatatgatgtccacataaaaacttatacaaatgttcataagagcattagtcacaatagccaaaaagtagaaacaactctaatgtccatcaactgaagaatggatacctaaaatgtgttatatgcatacaatagaagatttttcaaccataaaaaggaatgaagtacagatacatgttgcaacatgatgaaccttgaaaatattatggtagttgaaagacatcagtcacaaaaagtctcgttttgtctgattccatttatatgaaatgtccagaataggcaaatccatagagagaaagtagattagtggttgcctagggctcttgggttgttggggggaatggagagtgattgctaatgagtatagagtttctttttggagtgatagtatctagaattacatggtggtgatggttggccaattttaatatactaaataccacttaattgcacactccaagtgggtgaattgcatagtgtgtgaattatatcaataaagttgatagacacatacacacttatcttttaaatgtcagtagtgctgagattgaaaaatctttgtctctgtctattttaattctgttcttaaggcaatatccttctgaggcttataaccaatgcctcatgtattttgaggtatttctactctggttggagagtgttccaagccctttgtgaactctggtcactgttcactactattttctggtagttatttccatggtcccacagaggtccctaaacgcctttgaggactggtacttggccaagagttgaggtgacccttcagcagatctctggagctgtatgtgcagctctgttatctggcattctgtctcacaaattctagtttccctgcgcccaccaaagaggcagtcatgttgtttacctcatttgtttttcctctctcagggtcacggttctgcaccaagtgttgtccaatacctgagaagttttccccctcatgtgttttgtccagttttcttattgtttatgattggaggacatttctcatgcagttacttttttatgaatgaaagcagaggtcaggtggcacaattgaacactgcacagaaagaagagaagagggaggctggagaaaaacattctatgaagtttaaaacatgattaccggccaggtgtggtggcttatgcctgtaatctcagcactttgggagggtgaggtgggcagatcacctgaggtcaggaattcgagaccagccttgccaacatggcgaaaccccgtctctactgaaaatacaaaaattagccgggcatggtggcaggtgcctgtaatcctagctacttgagaggctgaggcaggagaatggcatgaacctaggaggcggaggttccagtgagccaagatcatgccactgcactccagcctcggtgacagtgagacttcatctcaaaaaaaaaaaaaaaaaaaaaaagttgagcacagtggctcaacgcctgtaatcccagcgctttgggaggtcaaggccttcggattgcctgagatcaggagtccgagaccagcctgggtaacacgatgaaaccccatctctactaaaatacaaaaaaagcagccacactggtggcgggcacctgtagtcccagccactcactctggaggctgaggcaggagaattgcttgaacccaggaggtggaggttgcagtgagccgacatcgtaccactgcactcaagcctgggcgacagagcgagactccatctccaaaaaacaaaaccaaaaaagaacagaagagcgagatgtatgaagttagaaaaactgtcctaaaaattgcccgtgttctaaaacttcaggaaaattaatcttcacttaaaaattagcaatgggaaaagaaccaaattcaaatttcttacaaaattattatgagaaaaaagagaataaggagtaggatgtcattacagataatgtatacatgccagaaaatcatggtcacagattaaataaaaatgacaatctggctgggcgcagtggctcacgcctgtaatcccaacacttgtgggaggctgaggtgggcagatcacctgaggtcaggagttcaagaccagcctggccaacatggtgaaattccatctttccaaaaatacaaaaaattagctgggcatgatggcgggtgcctgtaatcccagctactcaggaggctgaggcgggagaattgcttgaaactgggaggcggaggttgcagtgagccgagatcgcgccattgcactccaacctgggtgactgagcgagactccgtccctcacccacccacccccctaaaaaagaaaaactactgttttaaaatgagctaaaagacactaagaaaatgatactagatgtgaaagaacataactaagaagtatgaaagattggaaatgaggtgataggatttaagacagaagtataaagaaaaagatcaatttaggactgaagcgtaaacttgaaagaacataatagcgaataaatgtaatacatatagttttagagtagaatttaaaaagagggatgtgcaaaaaattaacatagcaggcctaatcacaaagctttccttagaaaggccttcctgcaagcttggcccttgactggagtctgggaccttgaatttcgggagagttttcaccatttcgtgatgagagtggctcactgtgccttaactgtttgtgcacacagtgtggtttatgctgatcacctaccttcttggagctggaattttggtacatggtagggagatggtgcctatgggaccagtccggcatagaaaccatgggtgctgagtctctaatgagttccctggtggacagcatttcacacgtgttgttacaattcattgctggggaaatttaagtgcatcctgtgtgactccgcctggagaggattcttggatgcccggttccccctggactttgcctcaggcaccttttcctttgcctgattttgctttgcattctttcactgtagtaagtcatagctgttagtattactctatgtcgagtcctgtgtatataccatgagtcattgaacctggcagtggtcttgtagactcaacatacacctttcccattatttgcctttctaatgggcttattggcaggatttagaaatgcaaagttagtcatgttgtttaattacagatcaattataagtgaatctacaaccctgaagttttgtaatatagtacaatttatattttataaatcaaattaactgccaaaaagttagacaagtgatgaatttatgaactctgaaagctgtacacacagaaatgttttcagcaatagatttcatgtgttatatggtagtttttgtcattgtttccattttaaaatgatatttaaataagttctgtacccttgttgcctttgtctgtcttttttttaagcagggttagagtaatatggagttgatttctctgtccagcttttgacaaagatgtttccctcccactattgagggaaaaaaagcatctattgtatttttggtgtctgaaatattgataaaactattttcccatgttatatataagatttctatgcaggttcacaaagcatgaattctagccagatgttgttggtgagtttcatttcaaagcacatagaatttgtcttcttctacaatggtaaataatttagaattgcttgagtgtttcaggtcagtgatcggatactattggataccttaggatgctggtagatataacccttagttcaaaaatatatataattctaatggaaataggtgctaacagaaggaaattgcatttctattgggaaggaagactccaactccagaatacgtataaatttatacttataaatacttacgaaatatatgggaactccagaagcatggttagtccttgtagttgcttgataattattctagatgggaatcaatctgatttaagattgcccagtggttgatcttttattaaaatcaatgtagatatcagtttaaaaaaactcttagtgcatctgatttgaactttagattacttgtttagtaaggacaaaaagaaaaaacaaaaacacacacagcaaaaagaaaagacaaaaacacccataaccaaccaaataaaaaaccacacacacaacacattaatacttacgttaataccattgattaaaataacctatacctttgctctctaaaggtctggggttgtgagctaacttaaaaaccagcttggttgttcacagttactggtttccttttgatattgcagatatttggtaattatatgtagatgaaggctgtaagccttctaccccaccccctgtataccaggtagtgggttaattcaaactgaattctgccactcatttagatactttttagcaagcaggcacaaaaacagtcatgtaaactcttctctagctctatgaaattacaattctgtctttttggtattccgacagtaccttgtttcagtggttcacttgaggcatgtgcaacattataatagggacagttcacttttagttggagtcagggaacaaaccctgagataattggtagaacaggggatgctttcagaatccgaagcctaaaacaccatcccttagggtatggactgttggatttataggattattataccctgttcatatgagggaggaggcaactgggcagtatttctggacagcccacaaactgccataccaccgtgaaaaattatgtcttacacatctgttgttgacagaagataaaggcagtgagctgagatgcttttaggaaaggctgctagattgtggtttcttgattagtctcatgccaactgttatggcctggatgtttgtgcccttcaaaattcacatgttgaaacctaatgactactgtggatatattaagaaggggccttttactaagtgattaggttatgagggcagatcgtttgtaaatgggattaatgcccttatattaatagaaaagacttaaaggaactgtttgtccctcctccatgtgaagacacacagaaggtgccatctatggggactgagccctcactagacaccaaatctgctggcaccttgattttggacttgacagcctccagaactctgagcaataaacttctgtttacaaactgcccattctgaggtattctgttataacccaaataaacaaagatgccagctaagcaccgttctagagtcgacgtctgattagggcactaacatgttaactagtcacccctaggatggacttagttaaacctaattgtcagaacagcggaagtaaggactcatatctaaacacataggtaactggttagataccaactcagagcccaggctatcagccaaacttccaacttagatctttgaccatgaattcatgtgaactcttgtcagctacatagccaatcactgcctaattgtttcttcctgtaaataatgttttacattttataactgtctggctatttcacagacatttctggagctttgtgattcaaagggaaaaatataaacccaacctggttttccctaggaagatggcagatatttgtagaccctctactgtctgctaagctgtacaggtggtacaaaatgattgccttcagggagcttagatctattaaggagggtagaggcacaacataaattgctgtaattcaagacaaattaagttaactgctaccagagggagagaaagggctgaacacttgctatcctttcagttttggagttgcttcccgctgaaaatcattaacagattatcgttctttggaagctagatcaaacctgtcacagatacattacactaccaaaggacagcattgagttactaggcaacgttcctaatttgaggtaaagtatttctcttttccagggctttggggccttagtcaaaggagtcatctagaagtgaaggaatctctttttgggtactggtttttcgggctctgatattaggttctctaaagttctgggtgagggcttgttttcttaactcgggaaactggatgttacctaaatttcattatagctatgagaagggtggttaggtttatagcacaaacacttatgcctttcttttgttaaataatttagtgacctgctgttattttccttgcctttaaaaataagctctcaagcctgtaagggctgttgacagaaacatctaaggactggctgataaaggatattgaattactgcattagtactgcattgattagtacttcttaacacgaattggaattgtacatacatttattagtcatgctgtagctcattctcaaatctttttgaaatttattgaacttctaattttgttttggatagatactgagacaataaggagagtgtgaatgctttaactcagtttaaggaaataacagtgttttatacccactaaatttggccatggtaatgtgtgttttttttcttttctcttttttttttttttggagacggagtcacactctgtcacccgggctggagtgcagtggcacaatcttggctcactgcaacctccgcctcccgggttcaagcgattctcctgcctcagcctcctgagttgctgggactacaggcgtgcgccactacacccatctaatttttgtatttttagtagagacggggtttcatcatgttggttggccaggatggtctccatctcttgacctcgtgatccacccaccttggcctcccaaagtggtgggattacaggcgtgagccactgtgcctggccgcatgtgtgttgttaattacagagtaaataacacttgttgcatatgttagaatcttttttttttttttttgccgaggcgtagtctcactctgttgcccaggttggagtgcagtggcgtgatctcagctcactgcaatctccgcctccctggttcaagtgattcttgtgcttcagcctcccgagtacctgggactacaggttcgtgccaccatgcctggctaatttttatgttttttagtagagacgaggttttgccgtgttggccaggctggtttcgaactcctcacctcaggtgatccgcctgcctcagcctcccaaagtgctgggattacaggtgtgagccactgcacctggcctagaatcttgattaaaagtatttatcaagatgatctcatgctaaagaataaggaggacagttttaagtatcttgacatatttttctagctgattacacagcttttcatgaagatgtggctactgtgcttggctaatgataaaagaccatgtttggttctattcctagagcaaaaccaaaacaaaatgttgttaccattacttccctttcctgttcttgttttttttttgttagagtaactatctttgtcttgcatcaatctacttaacagcaccagcgttaatggactacaacagcctgatgaattttcattttgctccttttgtttgattttctatcagaatgctaatttttgccataatgtagctggcatgtttctagttcctgaattagttttttatttctttatgcacttacatctaggctaattatatttgattcttttacaggaattttaaacagctatcaagtaaaatggaatttatgacaattaatggaacaacattaaggaatctggaaatcctacagaatcaggtcaggcaaatacaagggctagttgattataaatcgttttgggaaaaacttctgagtaaggcagcagtctgtttttagaggtacaggtgaaaatatagtgtctttagctgactgcagtattaattgataactgtagctctttttggagaatgaactgtacataatatttctctgggttttttggggggaatgatggagctgccctttttaatgactgaggggcatgcttatcctgacaatttctgtaacatcatttctatatcatgtagttttttggaaaggcatcatcactgaaaatatgaagcggattttttttgtctacttggttatatttttctatacacctttagctttttcttgaaatgtttgcagtcttatttaattattcaggttataggtttctgggatattcagtttgactgtaagatgcataacatttcagtttgcaaactttctttttttttttttcttctttgagacagagtctcgctctgttgcccaggctgggttgagtgaagtgatgcgatattggctcactgcaacctctgcctcccaggttcaagcaattctcctgcctcagcctcctaagtagctgggattacaggcacctgccaccacgcctggctaatttttgtatttttagtagagacagggtttcgccatattggccaggctggtctcgaactgttgacctcaggtgatccacctgcctcggcctcccaaaatcctaggattacaggcgtaagcaaacgcacctggcctcagttcacaaactttcattgtttatttgtcctttgttgatgaattaggaagataacggggagattaaacttattgctttcatttattaaattatcacttgggaagatgagacattatattataaaattaatgttatcctaacaaagtaatagagataaaaagcaaccccacgtcatttgattaagtactggagaatcatctgaaccatctgagtcaaaggagttaaaactcttcagaaatatttattactattgcaaattaaagtaaacactgaatttattctcctgactcctgaatctgcatattattaactagtttctctcagtttcttcctgttccagtctgttctagtatgctgaattcagatgtatttttgttcagtaacatttttatcttgtcatcatccaaaagctgagaatctgtcctgccggtctgtctcgtcaactctgtagccatctccatgataggaaataagtagtaggaataaagagacatttctcggctgaaggagtgctgatagcctgcagccagccctggcattgtaagcgttccctgcttctgccgcatcttccctgttcaaatcctactacaacagagtcagttctgaaatcaaattcctaaggcagaaatcatctggaatcaaaatacccttcaaaattccttcctttattggaccttgcaccattttagaagccgaagctgagattaacatcttctgcttgtctttgtacttcaacttcacccccaccgcccctcgcccacctttccaaggagcaatggaaagaggtgcagggtaggagttgggtgtcagcaagaacaaggatataataggacacgtatctgtccctcctctcttgtctgagcctgcttctccaggggtgtcagggaattggcctcctcacgggaccctttaccccagtcaggccagtcaagctgtggtctcaggagcagtgctgctgctgatctgaactgccctccttagcctgtccagccatcctcagaggaacctttgtgaccttgtaccttctctgtgctctctccattgaactcctgaggcctgagagcttatgtcacaccttttctagttgattcctggcaggtggcattgtatcctaattacgagtctttttccaacttggctataagcaccctgagggtgggaccatgtccttgctatgttcagcacataggaggtactctggaagtagctacttacagaggagaaggaaaaaagaaaggattaaaaaaacccggccgggcgcggtggctcacgcctgtaatcccagcactttgggaggccgaggcgggcggatcacgaggtcaggagatcgagaccatcctggctaacacggtgaaaccccgtctctactaaaaatacaaaaaattagccgggcgtggtggcgggcgcctgtagtcccagctactcgggaggctgaggcaggagaatggcgtgaacccgggaggcggagcttgcagtgagccgagatcgcgccactgcactccagcctgggcgacagagcgagactccgtctcaaaaaaaaaaaaaaaaaaaaaaaaacccaactcaagtggaaacagccattttaggtctcaagatttaaatgtctcagtgggctttgtactactgtgaaaccttggttaaaattaattatgtctagttaattgtgatttttttttaaggacccaaattttaagtggcaaaagcaaacttttctaaggatttagtaaaacaaactaaaataaaatccttcctgggtaaatacctagagtgcagtgcaagttcatgtctatctccagcaccttgttcagtgttgtcatgagagcattggtttataaaatggtaactgtgaaataccaaaggaaaattaagtcatcttcctatgttgtatttcccaaggtaggaaagtatgcaattatattttaaagatgcttagataaagcatctttatcatttcaaaagaatttctgaataatttattctttggtaaccaaaaactataaacgatcccttttctgtgtaaaatgtcagtacttcattctgtatgtatgtattcatctgtcaaacattaaatgaacacctgttatgagccacattgtgctaggtatatatgacatttagaatcggggtatatgaaataacaatttggcacaaataattgtctagttaataaaacttgttttctggtctttcttagactgatatgaaaaccaaaggaagtttgctgtgggttttagaccacactaaaacttcatttgggagacggaagttaaagaagtgggtgacccagccactccttaaattaaggtaaaaggaattctttttggggtgtttaatctgaaattataaaattttgaaattaaaggcattttaaaaccaaggttaccattgtttttaagaacacagttttaaattggagaacattttattttagaactgagcaatagactggctctctagtattacaaggatttttttcctcattctcgtgaatgagcctgcctgcagattggcagacatagggcgttgtcccaggaaagtgaggatagatgccttttgtggagggttttgaaggctagactgaggagttgatagccagagggagttcattcagtgattctgagcatggggctgatatcatcagagctgggcttgtgtgtaggaggggactaagtggtagtagtggtgggatcaagttagcaagttcatggagaggtgcccaggacctgagctacagcagtaatagcaaggagtccaaaagaggggttaggtgtgaaatgcttagaagagtagagtgagtaaagttggagctccctaagggaagatacttgaatccagtgcctaacatacagtgatttccaaggttgtctgcacatcggaatcacctgggatgcttcacaaaatactcatgcctgtgtccagcccccatagattgtgatttaattggtctccagcatgaccagggagttgagatttaaattttacccagatgattctgatatgcagataaatttggagattctgacctagaacagtgcctggcacttagtagaagcccagttaatgtttattgaatgaaaattgttatttattgcacactttctatttactggtgtttaatactcaaaatcaccttctgagataggttcttgaaatgaggaaacagattcagagagcttcactaacttgcttagtgtttcatagctggtagagataaatataagatttaaaaccagcattgactccagagaccttagcaggaacaagccattatcctgaatagttatacctctggctagaccagagtgaatatggtgtgatggtgaagagaaccgctatgtgttggctctgtcagctgagtgagtcactcccactaatcctcagtgttctcacctttgacatggtggaacacctcatcacagcattgctgtaaggaataaaattttgagctctttatctcacaccacacagtatgctaggagctttatgagcattgtctcttttaaactgcacagcagcctcactaagcagatgctgttattagccctgtgttactctgtgattaataaatagtcactattttcaataatggattgcagatgttaatgttggtcataggcttgaagacactgttatgggttttgctgttgttttcttctttttcttttgcaagtttttttttttacaatgccaactttaaaaggtcactaaagttaactggacaataatctaggcagacatcactttacaaaaaagagggaaagcccaaaatgccaccttctatagaaaacgcacagtacagttttattcagagcaaagaaaaaagaaacttgatcatactatgagaaactcagccataggtttggaatccgtattcacaccacacattcactgaggacaatattctgctcatacgattgatttgctactgcatttcactgctgtttgtctgatattaacaattttaaacagagcagggcagctagtatttggaacaatccttacagtgtgacggcgtcaaggacgtttcacttctgttcacaccgctggttcgcttggcatacctgggtttcctcttcttcagtaaagtcatttttgatattggaagtcttgcgaatcttctcaggacttttctccttgattgtattggcaacagtcttgtgtgtaacatcaagcaaacctttgatgtctaagtagtttgcaggcagaagtagtacaaaaagtattccttgatcgactttcaggaattgttggtcctaaggagggatctcctctgttcgttttctttgttcgcatcatcctcgggaggaggacggccatttttgtggtgggtacaccaccaaatgaccttttaaaaatattgctgcattaactttggtagaggagctgggtcgttatctccatcatccattctcatatcttccaacatggtcttgatagtcacagattgtttggcaatttccacatcaaatatctccgcatcaaaactcagcatcttaattgacggcatggtgtttgagcttaaggagaccactggccagaggctcatgagagcagggcgacatcagcaaagaagaggaaggcagaggacaaggacactcaagacatggtttggatgatgataattaccaaatcttttcagatttagtgggtcactccgatttcttttcttagccataaagaccttaagacatgggaaactgatgaggtaaagaagaaatcctgaaaatggaaatatcttctttagttcagcattctaatgaaataagcagaccttgtagagcagacgcagacaagatggctttctgtggacaacagtgtaagggatgcagcattgtggctgctggaaaggctgcctaaacatctactacaattcttactgtgtttttgcttacatgttacagcagaaacagactcactagcagacttttccatgtaaattaaaattcttcatttccaatgttaaatttcctttttttttgtgtacccaggattaatttgagataaatctagtagaccatgttgtctgttgttaggcgccgaatcatgtatctctggggatcctaccttcccagaaaggcagagagaaaatatgccaggcattcaacactgatgttttcaagtatgaacttttcactgacctaacactgatgttagccaaaaacaaacacacgaaccttttctttgcccttttattttaggtcatggtttttaaacttttatactcctaatctattaaaatctatttcaaaagaattccagtttaattttaatggcacttgcaacgtattccaaacaaatacctggagagaatctgctgattagtcagtggctcagctatataattagtcatgtaccacatgacaacattttggtccttggggattgcatatacagaggtgttttctatgtttagaaatgtttagacacacaaatacttaccattgtgttacagtagcctacagtatttagtagagtaacatgctgtctgggttttagcgtaggagcagtatactgtaccatatagcctaggtgtgcagtgggctgtactatctaattttatgtaactatatgctctgtaatgtccacagaatgacaaaattgtctaacgatgcattttccagaatgtatccccatcattaagtgaggcatgatggtgttgttgtttatactgacataagtgccttactgatcacatcagtggctcatccagacaaatattctgtctctgacattgactgccaaaggttagtttagggtctggttttcttctacagtgagatcgtagaacaaataatggatgacgaggggatttagcaaaataatgcagatctccccaggttctgcaagatcccattgtttgtcagtcatccatgaattctcctaaatcccttaagctcctctttgtatttttatcttgttctagctcttaagggcaaacacacagttcataagtctaggaccaggcattcaagtttcagaagactttccactcccgtcaccttttattctataaaatggtctctttggtgcaaaattttaatagtgacttttagaaagtaaaaatgatttttactttacttattgactgattcaaagagttcacttagattattgaggctggattttactgtactgatatcacattagcttttataaatagattattttttcttatgtgttctcacctgtagtttttatcagttctgctaattttaggcaagaagattcttcagtgtagttgttttttaaataaatgcatgtcacattggcatgccattattcttaaggccttttaaaattagattatatcgaattaattttttttgaggttctgtctttggacttctttcagttgatatagtcttgtcaattttttatttacacacacacacacacacacacacacacacacacacacacacccatatgtatgtcattggttttgtcaaaaagcctgaaaatgcaaattctgcttgtaaatattggtagaggagaaaaaaagaaaaccgtgagatgagtctgtgttccagactcattggtgggttatgtgggatgagtctctaaaatggtgagttaagcaaaataattaatttccaaggcagatttgtttatcttagaggtattccactttcagtagcatactatatactttaaaaattaaaagaaatttagtttctttcatgagtacctctttcttctacctgtactttacattttttaattaaaaaaatttgtaaagttttatctttaattgacaaataattgtatatatttgtattagggttctgtagagggagagaactaataggatagatgtatataaggagtattgacttacatgatcacaaggtgaagtcccactgtaggctgtctgcacgctgaggggcaaggaagccagtctgaatcccaaaacctcaaaagtagggaagccaacagtgcagccttcagtttgtcgccaaagggcagagagtccctggcaaaccactggtgaaggtccaagagtccaaaagttgaagaactgagagtctgatgttcaagggcaggaagcatccagcacaggagaaagatggaggcctcaagactcagccagtctagtccttccatgtttctctgcctgcttttatcatagccacactggcagctgattagatggtgcccaccagattgagtgtgagtctgcctctcctagcccactgactaaatgttaatctcctttggcaataccctcacagatacacccaggaacaatactttgcatccttccacccaatcaagttgacattcagtattaaccatcacaatattcatggggtacaatgtgatatttcattacatatatacattatagaatgatcaaatcaagctaattaatatatctatcacctcaaacatttatcatttttttttgttgagaacatttaaaaccctcttttagctattttgacacacatacaatgcattaactatagtcaccgtactatgcaatagatcaccagaacttgttcttgtctaaccaaaactttgcaccagttgaccagcatctctcttttccccatctaccctctcccctagcctctgatgaccaccaatctgatctctacttctatgagtttgactttatttgattttacatataagtgagatgatgtggtatttctctgtctgtgcctggcttatttcactttgcattatgtcctctaggttcatccatattgtcaaatgatagaatttactgcttttttttttaaggctgaatagtattccagagtgtgtgtgtgtgtgtgtgtgtgtgtgtgtgtgtcacatttaaaaaatctattcatctattggtggacactttggttgtttccatatcttgataattgtgaataatgtggcagtgaacatagggagtacagatatttcttcaacatactgatttcaattcctttggatatatacccagaaatggaattgctggatcatatggtaattctatttttagttttttgaggaactagcatactgttttacaaagtgactgtactgatttataataccaccaacagtggacaagggttcccttttctccacatctttacttgttatctttcatcttttttaataaaaactaatctgaaaggagtgaggtgacctattgtggttttaatttgcgtttctctgattagagatgttgagcattgtttcatttatctattggccatttgtatatcttttgggaatcgtctattcagaccttttgcccatttttaaatagggttatttgttttcttgttattgagtagtttgagttccctgtatatttggtatattagccccttatccagtgtttgatttgcagatattttctcctagtccctgggttgtctgtttactctgttcattgtttcctttgctgtgcagatttttagtttgatgcaatcccattcgtctgttcttgcttttgttgtctatagtttggttcctgagcatcccaaggctttttctcaagtctttgcacttgttagtctttgtacttcgtggtctctctacgtagaatattcttctgtttctctttaatctttacagggttaactgcttgtacttgaggtctcaacttaaaacgttgtgttaatatcttcggagaggttttatttgacctcctaatctaaattatgttccttgtatcactcattgatagcatatagggtttaatcatgattgttacctatgtttatttaatatgcatggggctcttacattatctgtacaaggggtcttcagaaagttcatgtaaaatgcatattatgaaaaaactttgcatagatttcaaaaaattttggcaccaaaataaactcatactaacttgttagagcatgtctcaataggatgtagtttgaggcattaacagggataagatatcagtttgaaaagagcttctatcagaacaacatgaattctgctaaaaattaaagcgagaacaaacaccatatttatggtgaagcttgggtggaagagtggtgacatcattaatgctttatgaaaagtttcatgagacctcggaataaacaccacacatctacaactatctgattttcgacaaacccgatacaaacaagcaatggggaaaggattctctatgtgataaattttgctgggaaaactagctagctggagactaaaagtccaagatcaaggaatccttctgaggcctatcagggagaatctgttctggtcctctctcctacctgctggtggtgtgctggcaccctttggcgttccttggcttgtagatgtagctccttgatctctgccttcatggttacatggtatgcttgctgtatgtatgtcccttcacacagtgttttttaataaggacatggtcatattggattaggggtctacccttactgcagaatgacctcatcttaataattccatctacaataaccttatttccaaataagataacattttgaggtagagggataaggacttcagcatatctttttaggggtacacaattcaacccaaaacaaataggcccattatttccagattttcttccttttggcacacatagactgattatacccatctctttactagaaacaagtgttttgattattatttaaatgttttgctcatctattcaacgtctgatgtgaggttgtaaataaccattgaattttgtaaaattgccaatcttgtgcaattttgtgtttgtagtacagttctctgaaaagttattctcttatctttgacaaatatcctggacagtatctgtccaggtgaaggtatgtatgcaaagtgttacattaattttagagatgaaaaagaaacatttatatatatatttaaaaataaaggaaaatgcctaggaagaaagaagcagaggtctgaatctgagattcgaagaaagaaaagtagccaaggtggaatgggagaagagctgaggtctaagaggtaaggtgtgttactctgggaacatgtctttgtataggacaagcagaggacttaaagctctgagggatcaagggagtagaaagaaaatgtcagtctagtgaactaatctctaactgtgctttattttttatctgtatttttttcagctatctttagagatagttattctgttttagagataagaataactaagtctcagtttttccaaggtcatccagccaagcacataggggaccttttgaaagcatagttttggagttaatgatacttcagcttgagttctgattcccttttgtcactttggagaagttatgaatttgtatatacctcagtttcttcacctgtaaaatgggaattaactacctacctcattgtggtgttgtgaggaccaaatgagacagtatatgtaaaaggattagtgtggttcctcatagcaattttttggtcaagaaggtagccatggtctttagaataccaaaaaattggaagcagtgtaattattagtagggaaagggaaaataaattgtctggttatatattggaatattatacagcagttaaaatgaatgacttaagtctatgtgtatcaacatggataaatctcagaaaagcaatgttataaaagaacacataaatgatatcactaatttaaattttgtcacacacaatatcctgtttaggggttcaaacagaagtggtgttttcttgtcacataggcagtcaagacaataataacttctgggaaatgagaaaagggttagagatacaggtaggctggtgttttacatgtatttgcaatatttaatttttaaaaaattatacagaaaatacacacacatgaattttttataatgtactgctatttgaccttcactaccatcataatcaggtgaaaatgagacccatgcacatctgtctagaaagcccatgttgaacttgagagcatctgttttccagcacatcttgcattagaaagacagaagacagccatcagatgaccaaggcttccagggatggcagggggaaggctgggtgcttgcactgtcagtttctaggatctgcccaggtcatttcttttcctgaatctggtacttgcctgtgttttcttttgcctgtagctaccgtcaggaatgtagggagactttaggaggattactggtgagtaggtagagtcttttatgggggcctactctcaaaataatataaccatgaacaattgaggaatgtttttttgtggtcccttttatttatgctctaaacttgactagttctgggaattgaggaatctcaacctcacgttctgattgactaagtaaatgctaatgtgttcgttaacacaaaaggcaatgcattggttagggaagctagctgttaacacaaagaccccaaaaagtctaatggctctaatgttgtgaaagttaatttcttctttttttttctttgcataaacaatccatggcctttccacattggggggtggggtgagactctcatcacataggcagttaggaaccccagaggctcttcagttttaaacgtgtagcttccaacgtcatcttgagaactgatattcagcagtggaaggagaaagaacagggaggatatacatttatggcttttatgtgaggcaggccttgcattggcacatacccttctgcctaaatctgattataagcagaatgcattccgatggtcacagcttactgcgggggctagcaaatgtctgcttgtttttcaaggaataggaagaaatgtttagtgaatacctagcagtctgttgccagagatggtttttgttgtttcaattccattgtacattcttcttagcatttaaaaaattatttgaacttttgaacaggcaatatcttcacatactttaaaagtttgaaaatctgaaaagttacacagtaaaatgtttgcttatcattcctgccccacatctactcagatcccactaggtaatcatggttattactttatcatgtatacttccagaaaccttttgtttaaaaaagcaaatatgaattttatatatatatatatgaaatctcttcctcccttattacatagatggagccataatatacccagtactttgtacttggctgttttcccttagtagtataagatagttattttaaattttgtattattcagtctcagtgacaaggtggcgttcccagcgtcagggaatttctaatctaatctggtcaaggtataatctactagtaaggaggaagagatacaagtagtggaagcttttgtactaaaatcaaatacttacctgttactcactctataactcaataccacatttagagcaaatgagtaatacctttataagtcaaattagatttttagaaaactgctttaggaaattaggcatgctaagataattcttggcatttaaatcacataattaagggaatagaaaatggtttgtgttaggaaatagatctttgactacatttttgcatgactttctgatgtactaagtacattttagtggtcaatgttctctacattaaatggcttttgttttggtaaacccatatgtttggagtattaatggttgtatttctaatttgttaccctggcccaaatgatgaagtaatagaatgttgcatatttccttccacttaacatttaatttgtgttaatgaaaccaaatgtcacttttaactctggaacttctaaaatgaactacaccgggaagccctctgtattctttgtggtttcccatgttccatgagccagcaaccgggtgttcacttgcagtgactctggtttactcagcccctggggatgcattactgctcggaaatgggaagggagagtagcaggtggtgcgtaattgagagctgtgtttgattgggactgacctggtgcccctttcctctgccggtttgaatgagagtttaaaggaggaactgctgctgctaagaacaaaatgaacccgagtgcctcttactgtttgtcccgactgtcagtgcatagggattaactaacatccaggaacttttagctggcctctgctttgttcttcaacattcggaccttcagtgagctctagacctgcacaaacgacctgcagcaaatggcagctttcatttgggctgaggaagaggaatattggagagaatgaggagaaggaaataaatatctttcctttttggcccttcctgctttatctttctccatctttatgcctttattaatgaggattttccaaatatcggtcttcaaaaatgccataagaagacttcattttctgtggttttaatgtcataaaatatctccttatgtgaaataactagatatgctggatcaagcataacaaacatccctttaggacattgctgaatctgtatttaaaacataagggaagaactgagggaacagatggaaaaaggaactggaaatggaagtgaattgactgctgcagctgccctctgggctcctgcagatcttggtaatcaaaaggattggggttcaactgccttgtgggagacaggagacagggtcttgggtccatttaagttagagataccatagtaacgtgagacactcaaaggactgtggtctcagtagagaggtgacaaatacgtcttgacctgttcttgcctgaggaaaacgtttctaagaattcttaaccacaggccctccctcatagattttcagtttcaatttatactctgtgtggtctggcaatttccaagctgtgaaacttatttaaaacagtctgatggtactcacataaatcaccaagttaaaaaaatacaaaatagaataaaaaatatgagcatggaaaataaatactatcaaaagggctcagattgatttaaaaaggaaacacagacaattctttaagactgaatggactaaagaactcattcatgtaaccaaaaaccatttctgccacaaaaactattgaaattaaaaaaagaatgacttaaataagaatggatcttatactccaaaaagaaagaaagaaaagaaaacaacaacaacaaagcaggatatgggttaaacaagaatagaggaaataactgaaatgcaagataatacctgaagaaattacctagaatgcagcacagggtggcaatgtcaggccttcagtgtttcttctctggatttttgaaacagctttctaactggtattcctgacactgttcttatgtgcatccagactattagccttggatcccagctcctgtgatcacattttcaaaccttcaccctccattttccactaatcttttatagacaatagctaatcttttactcaatagctacccccaggaaatcctccctgatcctaaaactgcatttgttcgttaggtgctcctggcctgtgttcccattgtacctagatcataacccagttataatcttattacattgttatcattaatgctttttaaaaagttttactattcatcactagagtgtaaattgtttgtagactagcaaagctctgttaacaattatagccctaatgtctaccactttgtacaattagtactttgtaagcactcagtaattgttcattgaatgtaagaatgaatggtgtatgtgaaaggtgaagctatataggtctaatgatgcttagatcctaggaaagggcctatggttcatgtttctgacaggagattatttaggtagttcatttagccatttcacatgaccaatgtgttaatgtctgaatttaatctactcgttctgtgctgtcttaaaagtcaaacttttcagtaaaacgaaaccaaacaaaaaatacacccctagcagtttgtatttcagctccccacccccaccagacaactttttttaaacattttatgttggtaggtacatagtaggtctatatattaagggtatatgagatatttgttgcaggcatacaatgtataataatcatatcagggtaaatggggtatccatcaccccaagcatttatcatttctttgtgttacagatattcccattatactcttctagttatttttaaatgtacaataaattgttggctgtagtcaccctgttgcactctcaaatactagatcttattcaatatatctaactatacaaaattatcttaagtttgaattatagaggcattttcacagtagcaaccagtaggtactgactccatcactgacaatagctataggtcacactctgtgtttctgagtgacagccacacatggtagatactcatgtcaccacctagtttatcttcaaatgtgaaggactccagtgacactcacatttagtcctttcatctttggtagtaaagatgaatctttgtcatccccaggacctcttctttttgtttgtttggtatatggaatgaaatgactcaggtgccttctttcagttaatttaagttgtatagtaagatcaaccgtagaatactatcagtcatcttggaataatatctttatcatcatccaattgatgatgcttcttccagttttgtttcctgttgctatcactccatctgtcattaattgcactaagataataattctctattgtgtggcctgacatactgttttattacaattatttggaaggtcttgttactactgcacattaaaaaacaattctaaggtatgtgaattgtttaatatttaaaaatgtagtcattcttgcttatttccattctgatcttcgtacaggagttgaagatggaattatacctaaccgcagtgatgagaaatttgtggtgaacagtgtcacataccctttcactctctccctgcccatttagacctccataattattaatagttacattgtgctttctcaatgcaacctactgtccagtctcagcacagcgagtacttcagatcattactacttgtcaggtttagcactcaagatcccaggactagcttttcttgtataattcccacttgttgttcactttgcacaaaatacctgtttacatatctatgccctaaggtttgtccatacatagttatttctgagctcatattttggatgctatttatccctcttccatgctgttctttgtagtgtctactacacaaaatttgtaacgatgtggtaacagtaaacatttatgagtggttgtcatgatgtagcaggtactgtgttaagtacctgacatttattatttcattgaattcttgtactaacaccaagagttagggctcattgctcttctcattttataggtggagaaactaggacaaggctaaataattggtaaatggcagagcctgggtttgaatcaaggccacctgacttctgagcccaagttggtaacctctgaggtagtccttaaagaaggttgggttaaaaccaaactgattgatagtgaacatactgcttttgcctgtgttggcactagactaaaataaaaaccttttcctttatgttttcccagattccaaaccaacttggcctaacctttcaagtctctaagaaatttatagttttatatctattaaaaaaatcttctggtagacttcataaatatgacttagatttttattaaacttttttgctcgtatctttctgtatctcagaaaacctttaatttttgagacagtagctatttgtgtaggctgtcttatatgttcacagatggcattattttatcagtcctcaaaccatctgtagcatcaacttagtctattccaattggtgtcatctttcatttatgcaggagtgagttattaaagtaaaactttatatttgtataacattttgggtaaatgttagagtaaaacattggtttattttatcacaacaatcctttgcaaagaaaatttattttttccagctcatcttgatttactttatatgtagtcttcagaatgaaattgaatcgaataactgtttattgagcacaaattgttatcctgaaatgtagggataagaaatgacccctgtgttcactgaatttatagtcttgtaggaaagacagtgaagtagtaaattcccattgaagaagaaatacaattatgattaccattatgagaagggaaaagacggtagtatgggaaatgatagtaaagggattaagtctggtctagtgaatctagaaaggcctttcagaggaagagagggtaggagttcgccagacgaagtgtagctgatgggtggtagggaagaggaaaataaccttctaggcaaagtaagcagcaaatgagaaagcctccatgtcagagagcttggagtaactaagtcattgaaagatatgcagtctgactggaacttagagtaggaggaagagagtgacacatgatctcaggggagacccaagagctaaacaggcatcagttgttttttaggacaattaaagattctggatttgaacctaagattaatagcaagtcacagatgagtttaaagcagaggtgtgacatgaacagatttgggctttaggaaaaccactcaggctgcagtgtggagaatgagttggaaaaaggaatggaagtggggaggaaagttaggaggctgtttcaatataatttggacttagactatagtagtggctgtagaggtggagagtggtggatggattacagagtccaccctgctgagaatggaagagccagcccgtgtgtgtacaaagctctgtcttgctctcctgcatcgtactaacaaatggtccttctgcatgcaagagtatgagccagagaaaaatggaacaaaaatgaggcctgaagttagtatagaagctctgtattatgaaaaggcatgatctcacaggtagttaaggataataaagacaaaagcactcactaaatcgaaagtcctcagtctgattgtaatctagccaggatcctgatctaagatttgcttttcatatcagtgtgtatgatgtcaacagaattttgagagacaccaagtttattcagtggctgatgcctcctttcccccaaaacatcagttcattctttcatccacttgtttatttattcattcattcatttacaaacactttaaatccttactgaggacttactactcaccagacatgtttacttatcttagtttttaatactacagatggtcattatacctagtgtgggcctttgatgtttataggtacttcatggaccacatctcattgatgatacatttagtccatcagatttccgttttaagttgagtcatcacttaaggtgtagccgttggtaaaatcccgcagcactgatctcctatgtatctgaatgtcatatcctctgcactttctattgctactccccaatctttggtcagggtcaatatgtttaatttaattcattcaaacagttggtcagttcagccatcaccaccaccactaggtcgtcttgttggtcattgtttaactattatattagccaaggtaatgcaagctatcagcaaacaaattctccgtctaagtggcttaaatacattagaagtttatttcttgctaatataagttcaattggtaacagatccgggaatggtggattttctgctccactgtgggctcaggctgatggagttaccatgaggctcacaagcttgcctagctggcaaaggggattaggagaatgtgaaagcttattcaggaagtttttatgggccagggctagaggtggcttacatcattcccacccatgcttcagaactgaggtacatggccatacctaactacaggggagactgggaaatgtagtctttgtgtttgcttggtgagcctgtctttgtcaaacccagctagtgaatttccttgtatgatacctgctctttgattcagataataataagaggcatggaaggaccagatatattgttgtaggactttttccttagttcagttaaagacagcgaggttgggggagggtggtcctcatcacacagccatgtaaaattaggcccgcagacaattcgaaggaggagaaaaatggaatttattgggcaaagagcaataaaaagggaaacaaagactctccaacaagacagaacgagaatcttgctagtatgcttcccgcctcacagactgtaatcccaggttccacccaggaggaggaggggccaggctcctccctgctgccaaaggcgtgaacttctgtgtctccaccccagtgcaccctcctctcaatgcatacgcccattggagttttgtcagggagtccttcccacatgactatctcagtatgaaggaggagtttcctttgtgcctaataagtggctgtgtcacattcctgggcattagagtgggaaatgtctatattctgaattcctaacatatctgattattgctattactcttttctcacagggaaataaatgcccggcttgatgctgtatcggaagttctccattcagaatctagtgtgtttggtcagatagaaaatcatctacgtaaattgcccgacatagagaggggactctgtagcatttatcacaaaaaagtaagtgtgatagaaatctattaaagctgacagtgttcttcagcttgaggacactatatattaaaagaaaacttttgagagctctattattattttattttgtaaaatcttacaaatagcatgcgagagtagctgaatcctcagaaattttaatagtacaaattagagttattccaatttttccattgtagaaaataaagttttctcatgtgccttaactacagcaacatagaggcccttctgttataatatagggtattctcctgtttcatcctgaaagtacagactattatcaaaataggaaatttatgtagacttgttattttagaaaaaaaaaaccttatttcttttgatcttagaacaacttattgtttcttaaactatggaaaaatctgctagtataacatctgtggtggtagttagtatgcaaacaagcttggatattgaaggtgagtaaaggattattttgatttttatcacttaagctttacagtttgagtcatagcaaaaatgagtcattttccacggttagggaaataatttaggttatcttcaaaatatgcctaaaattaaaaaaattattaatatttttaaatgataaaacactataaactatggtgttttactttttgcagaagtcattcacataccttatactctttgttccttatcaaaactttatgacattgagaagttactatttttattaccttcttactaataagaaattatatctaatgctatatatgtgtgtgtatatatatatgtatatatataaaatgctgcaaccacttgaattaccttggctaatatgatgatgctcagaggtttagtaacttgctagtaacagaatctgtatttagacccaggattcttgactgtgttttcattggctgtgtcttttggatgctatcatgtttgatgtagttatcttgactgccattttttttttctggttgccacttttcataagcaaattttatttttcctccaaatgtaactccttgccaatttaataattttactgtgtaaccatttttatgtgcctaaatttttattttattttgttttattttgttttattttattttattttaattttttattttattttatgttatgttatgttatgttatgttatgttatgttatgttattttatgttattttattttattttatttttgagacagacttttactctcgtcacccaggctggagtgcaatggcgtgatctcggctcactgcaacctctacctcccaggtttaatcgattcttctgtctcagcctcctgagtagctggggttacaggcacccgccactatgcctggctaatttttgtatttttagcagagatggggtttcaccacattggccaggctggtatcgaactcctgacctcaggtgatccacccgcctcggcctcccaaagtgctgggattacaggcatgagccactgcgcccagccaatatgcctaaattttagttgtgaccaatttttcattagtgtttctatatttttcatccccttttacccccacagagttttactagaatgataagtactgcttctaagaatacttgaggtgcccaagaggacttacgtaactgttttacatgcctcagctaaatttgaaaacaatgcacaagccagaactggaaatactgatcctggggagaaagatatatgagttggttatggggccggggagcctattgcatcattattgggtacaccatgttattgttttgctggcaatagcagaagctgtgctgatagtcgcaagttttatggtagacctttttgaagttgcaatgtgggtgccaaaccatttgttgtttttatccttggctcagagcctgaaaattgatgcatattaaccttctttaaacaacagatctccaggcaccttgccttaactacttcaaaggattcactgacagatgtcagagatttgaaaacagaagcaaagctgaaaatctttcagtggctactcaaatgcacaaagtcaaagtgtccatggcatcaagatggcagcatcagttcatggggctgtgatttctattccaccttcctgcctttttgtaaactttactttgatgtttgtattgcacagggtttgtgtatttataaaagtttcaaaactctagtaaagtcagaatctaattcatttaaaaagtggccggtatgcagtgcaagaatgacttattttggaatttcaaaatatagtttactaacggaacttataactcacttggaagccattccttgttgctgttttagtgtttgtttacacaagaatgtacctaaagattagtttgaagggtgaagagtagaaatgatctggtaacaaaccaacttcaggaaagctgaatgctttaaaccaatgttttatagattagttggctggctctgtgtacacaccatcaaacatatgtctgttctttattattagattactctaaataagcttctactgtgtacaccacatagtgggtgatgtcctgggtacagattgtgccaattatgtgaaattcataaaatgagaaggaacactggatgttgtgggaagtggttagcataggctgtatggttttgtggaacgtgccctggaatatgtaccaataggtgtttttatggtgataatgatagaggatctcaagtgagctgattctggtataaaatagacatttcttcttcttctttttttttttgaaacaagatctcactgtgtcacccatgctggaatgcagtggtgcgaccacagctcactacagcttcagcctccagccttctgagtagttgggacaacaggcacgtgccaccatgcccagctatttttttttttttttttgcatttttttgtagagacaaggtgttgccatgttgcccaggctggtctccagctcctgggttcaagagatcctcccaccttggactcccagtgtgttgggattacgggtgtgagccactgtgcttagcctaaaataaacatttcttttgatggcaaaatgttaaattcaaatcctgtaaatagtgctagtcacaggaacccataataactttgctcaagaactgttttgtaagaaattcttaagtaactgccgaggttggtgaatacatttaaaggataatcgcacttagcaaatgttgaggagagtgttttcagaatttcctaggtgaaaatctttttttagctaagcaggaataagcccacagctgcatgttcagtgtggcacttaagctggggtccttcccatcctgtgtccagtgaggccctgccaccatacttgtgggtctgtgctcaagctctcccagtgagacagctgctgccagaagtagggctgaactcctggagagtgacttcaggagcagccacttacccatcctcagctttcttgtagcttcttttgagttcttttgcttaagaaacttgagaacaacctgctgcctctggctttcaacatgattgtaaagcactactggttttcaccttgcttctgttgctgacttaactttacattgtgtctcagcttggaaaattaatcattttcttgggattacaataatcataagaggttaatattcaaaattatattgaaaatgtttgtgtttgtttctttacttttgttaaaaggtatcattaattgactagtggccaaaaagcttccaggtttcacatttatttaaacagtccagcttcctgtatagggtggggagggggtctttctggagaaaagttgcctcatgatacacttagaattcaacatttgctcagttggacctaacttcttattttttttgcataattcaccctttgtggttagtaattacctttttgaatacgttcttagccttaatctatttcatatatactatctattatgtgccttattactttacccctaaattgttttctcatctcaagacagttcttttcagccaacattttgtcagttttattttcctgagctgtcttctagagccttctaacttgatccagtctggactggttgtccccatatctgttgtatagtactatcttagattccctttacttcccttgagttgaatcttttattttctatattccatgtcttcctcttcgtttatttcttcattttggtggagtatatatcctctagaaccttcctgagaaagcacgttggaagtaaatcttttgaaacattcatgtctgaaagtggtttttttgttgttgttattattgttactaccttcacatttgattggtagtttggattggtataaaattctaggttttagatgacttcattatctttacttcctcttctgttgaatttttcatttctactattatgctttaatttccaagaatttttgttttcttgtcctccaaatgttttttctttttaaaagtagcatcttgtttcatggttgtagtatcttctgtttcatggaagatattattaatatttttagaagttccctaacagggcagaatccatattggtacacaagtctttttggattcttgatgtaaattgtgtctccgttttccttaaggacagtttaaaattcagataccttgagtcttttaagtcaattactgtttatttgtttactttatagcttctaacatattattgctgttgtcttcttttctagtgtgtttttttccttttttttttttttttttttttttgagacggaatcttgctctgttgcccaggcaggagtgcagtggcacgatctcggctcactgcagtctccgccttccaggctcaagcgattctcctgcctcgccacctgagtcactgggatcacaggcgagcgccaccacacccagctaatttttgtatttttagtagagatggggtttcaccatgttggtagggctggtctcgaactcctgaccttgtgatctgcccgcctcagcctcccaaagtgctgggattacaggcgtgagtcactgcgtctggctggttttatgccgttttaaacaatctcttaactgtcgtttcaagatggagagaaattagatgcatgtgtttaactcactgtttaccagaagctatgatataaaaattattcatgttcatgttaaaaaaaaaactacagtagtatgcaggggtatgcagtaaagggtaaaaagtctccctctgccacccttccatacctactacccagaggtaaccagagtaagtcacatgtgttacctcctaaaatttttattgatatttagattttttatttatatagaataatgtatatcatttaaagaatacaaagaaagtgttaccatgtaaatacataaaaatatatacatatatggtatatgatataaacatactgtatatattcaatgtatgttgaaattatggagttctatactgatgcaaacagatcttaattttcttttagctgtttcgtagtactacactgcatgagtttttcccaataagatcccaattgatggacatttatttcttattcatctttttaaattataagcagcgctactatgaatattcagacacacatatttttcactatttgttagtctatttttagataaattatttaaagtggtgcttattcaaagggttatgtgcacttttttattacgaagacatgccaagttgtttttcaaaaaggttagtcctctgctaagagtatataaaagtgtcttttttttcttttacatcctgttacatggttattgtgaagcttttaaatctttggcgttccgataagtgaaaaatgctatcctatatttctaatttgcttgtctttaattatatatgaagataatcgtatacatacttgctgttctctttctatgagctgcatattcagtttgtttagccattgttctttggattattcatctttttcttgtcaatttgtaagagcctattatgtttgggagaattttgccttgtgtctgttatgccttacagatattatccttcacattttttaacttgtttaacctatttttgctatatggtttatgttattttaaaaatgaaaaaatactaaacaagtattggctttgttttccttgcctaaaattatttcctttatacctttaaaatattacatagtatttaacctcatttagaaaatatcagtgatattttatttcaactaactagttaatagaaaatttaaactttcctcaattctgattctaacttttaaaagtcactaattaaacttcattttcatgtatcttatgctatttcataaaaaatatttctattttcagtgttctacccaagagttcttcttgattgtcaaaactttatatcacctaaagtcagaatttcaagcaataatacctgctgttaattcccacattcagtcagacttgctccggaccgttattttagaaattcctgaactcctcagtccagtggagcattacttaaagatactcaatgaacaagctgccaagtaagtaccagaccctgaattcttccttttcaccagtcagtataattcagtgcatttgccatttatttgtggattcttaatctttactagaataataatagaagttgcatgagtacatatataattagaaatgtgattggaccctaaaagtgttacattacagctggaatacttgctacctaaaatttaggcagtttaccatctaggacagatatagtactcccccacatatcagatgatggaaaggtaaaacacaggcaaagccaagcattagtagtttattaaccccaaaatgagtgtcagatatcttgtactcatttcctatatttccagagatgtctttatatttagaatctgtaaaagcaaagttatcctttaaaaggtagttataacatattgcacaaaacattctatgtaaatgaaataggatttgacatttacgtttgtctttgttttctgcataggcaaacaacaaataatttatctcttggttttaccatgggaatcatgaagttaaaaagcagaaatgattttagggtaattttgaccatcctcagagaagttaaaaaacaaatccataagtgcttagtgacaattggaaccacatttttctgacttccagtgctttcctcttttatcacactatgaaaaataagcgataactgctgtaattaataaacttcgaatatgtatttgcatgttttgattttttagagttggggataaaactgaattatttaaagacctttctgacttccctttaataaaaaagaggaaggatgaaattcaaggtgttattgacgagatccgaatgcatttgcaagaaatacgaaaaatactaaaaaatccttctgcacaatatgtgacagtatcaggacaggaggtaatgtcaagcttacttttattttctattagttttactctagtagaaaagctattttaaaatgtaaatagaaatctgaggataggatatgtattatcttttcaaattttctgttttattccttggaaatatgttgtaataacttgttttgataagagttattttaatgatagtgttttattagtctcttgttaaagtaatgcaacttaatgttatatgtatattagcgttatctgttgaaattatattatagaaaatctcaattactatgaataacaacttatagaattcatttgttctaaatccaggaaagagaagttagtctttgatccctaccttgcagatgatgaaatgatacaaagcctgtgttgattggctcatacagtgattaaacggtggggcttcctcctaaagttaagagtatagctgctaaaaaaaacaagtctagagtgaaaaactacagttagtgagtcttccataaaattatggtactgtttagaatatgtttcttgggggtgtgtacttctgtttaaagtttgatagtaatgtctgaatgagaaccagaaaaggaagaagtatgccttttaaatatggttgtgcttttcagtcctattctgggtcttgaggcatgctactcctatatcttatgtttaataaaatatgaagattcaaactgagggagtttgagaaattctgttttattaaaataccaaattaggaaacttatggttaacttctatagaatgagcattttattcaggattttcaaaaaatagatatttttccggtggggaagaacttaatttcaaatcaaatttttaaacatttacattgttttgtgtgttttgccaaaagattgttgaatgtatagttatttgaaataagaagctctacattaattgagaatgttcattaaagtgtttattagtcttgtgttatttcatagatttacccattaagtcaacctgtcttctgaactaaaattattaagatattatactcagcagacattcacaatgccacatagagctctatataacagaaaaatgatttgacaatatttatacttatgtttattgtctgaacagacaaataccaaatatttaattgtaactcttgtttttgctatgcagtcatgaccttgcaaagtgaaaactggcctaaaggccactattctggctattggtttaaaatcagatgatcaacactgctttagttactttaataaaagatatgtagtagaaaagtggctgccttttctactacatttttttttttttttttacagtggagaaagtaagtgtaagtgccaattctaccatttacatgctatacgaccatggaagagttacctctgttgtaagactattatggagaccaattaagttaaaatacatgaaagtgctttttaatcataaagtgctatgcttatactactcatataataacaataatagtaatacagttaccatttatcaagtacttgttaaagtctagaatggtggtaggtgcctacatatattatttaattcttataacaatgcccaaaagggtcattccagtttgttggaaagaaaaccaaggtttggagtagttagataagttacccaaggtccgaagcacaaatccagcccacttctgccagactctagtctttctattatattaatatcagtatttcattccatttattaattccaaatattaacacaaagattctcaacaccatggattttatctgacaaaatctagatattttagagctcatagtattcaaaataaaataaagtttaagtcttggaaagacggtcctggattcatttggcagtttttgagtaaaaatgagagaaaattatcaggaattcataagagatagtagactggttattcattatgagtgtggcattgaggtttaaaaagtacagcatggagatcaactaattgtattaaaaattattaggaagatcagttatcttttatctttactaggttaagttgatgaatttgaggaacaaagtttcttcgttattgatagtaggatggattcttgttggtttttaataatcttctctaggattttagtagaatgttaatacaaaattgctttcatagaaccttttgaaaaaaataattctattcattggaacaccaaaggaattctaaatattcaaaattgttttaatcaaattctgttttaaaaacgactacagtggctcacacctgtaatcccaacactttgggaagccaaggcaggaggatcgcttgagctccggagttcaagacctgcttgggcaacatagcgagacaccatccctaaaatataaaattagccaggcatagtggaatgtgtctatgctccctgctactcgggagactaaggtagagaatcacttgagcctgacaggctgaagttgctgtgacctgtgatcatgccactgtactccagcctgggcaacagagagaaaccctgtctcaaaaaaaaaaaaaaaggactaatgctattctcaaattatttagaggtacttaaaggactaggaacagactccatcaaatatgattatctctgagaagtgagggaggcagggtggaaaacccttattttacatttattggtgcttttttatgcctttctgttctgacattttatttctatacatatgtcttttgtaataaccttaaaagacccattatagcagccccatgtgagccacgtgatggtatgtggatcttgttatttttactaaaattagataaatgtgccagtctgtaaatccagtgttattttgacaacattcatttttcacctctgttcccagcttttatatactcattagaatactaaagccttattgtatgattccttattgtctctatgtaaatattggcttagaagaaattaatgaaagcagaaactttatatttttatgtaataatgtacatacattattatgtattatgtaatgaacgtatgtatgaatgtttgtgtgtatgtatgaaagtatgtatgtatgtaatgaaagcagaagtttacatagtttactgcttctgttgcagtctctatcatattttatgaatatataccaattatctcttaaccttgaatgaaatgtggaatggaaatggggcaatgtttacattgggggcagtactgataagtattattattattactaagggaaaaagaaaaatattggaaaaaatctttagaaagggttttattaattgacagcatgcagcatatccaaatacctgtttactggtttaaaatgtggaaaataatctgttacatctgagtactttttacttagatttaaaatatagtaaaacatccttaaattattaagagaatgaaattgggggattggaggaatgggttaagtgtggtgctggagaaaacagcagtttctggagtgagtaagagtttcggcaagcctagcaacgttgccagcccagtgataccacaggctatatagattgaataacaatatctggcatttaactaagacagaattgggtcccaggagaagaatatgagagattgcttataatgaatcaaggcagactactcacatcaacacctaataaacaaagtcaggaactgtagaccaggaaaagttgctatgagagctttctaagattactggaatgtatgctatttttctatgttagttttcttttctttagtaataaaattcttaaaccaaaggcctacctgttcattcttagaatgtttgaaaaaaagaatagctagagaaaaatgttgtatcttattgtcagtatagaagagaagaaaagctagcagaagacaactctgaggaggaacccaggctgaaactctgaggattgctgagtgaggaaaagggaccctcaggatcagtccaaggaccagaccctgtctgaggatgtgaccagaggggtttaacttgtgccttcctgactctcgctgttttcccccctgcagtggcactgtattggctctgtgtatggtagcccgctgtagtgattgtgctcctagagtagaacttttgatacttacagattgaatagttgtggtccaaactgttcccaaggtgctccttgttcaaaatgtccaccatcccttagccagtaactcctgtggagctctgtgttagtcattatgcatctggatgtgtccttcccaaatatcagtgatccaatcagtctgttcctgaattttgctgtttgcctttagcatagctctttccagaattattttataaaaaggccaacatttcttttagtagaacactctaaaacagcagaattatttagcacagtttaaaagtgattttatctttcccattagtgatattttttgtggtttttcaaaagttactttttgtagccaaaggaggcttgttagactcttcactcttaactatttaagtgggtgtggcagatttgaaactgtagtaattctctataaatgagggcatcactagttcaaaacagttttctaatgatgaaattttttagattagccactaattcttaatataattaatgtaaaagctacagtgtttctattaatgggaaaaataaactcaagaaccatgttgatactgttattaatatgaacattataaatacctgaaggtacgtgcatataataaaactgataaatgtgaaaaagttctcatagctctctcaagatgacaaccacacagtttctgggttccattctgctcaaaatgggtttttataaatttatttaaatgaatcattgaattagttcttttgtttttctttttgttttttattaagacagattcttgctctgtcgtccaggctggagtgcagtggcacaatctcggctcactgcaacctccacctcctggattcaagtgattctcctgcctcagcttcccgagtagctgggattacaagtgcctgccaccacgcctggctaatttttgtattattagtagagatggggtttcaccatgttggccaggctggtcttaaactcctgacctcaggtaatctgtccgcctcagcctcccaaagtgctgggattacaggtgtgagccatcgcgcccggcctgaatttggttgcaataatacagaaatgcaagcacactgagaaaagataatacataactaaggctaaaaatgaatggtgtgatagaacttcacttgcttcctggctgatttcagagaaccttatttgcagagcacagttggatctataaatatattatgaatgtaaattaaaatgacaggagatattatctcaccccagttaaaatggcttttatccaaaagacaggcaataacaaatgttgatgaggatgtggagaaaagggaactcttgtacactgttggtgggaatgtaaattaatactaccactaccactgtggagaacagtttggaggtccctcaaaaaaaaaaaaaaaatagagctaccatatgatccagcaatcccactgctaggtatatatcccaaagaaaggtaattagtatattaaggagatatctgcactgcagtgtttattgcagcactattcacaacagctaagatttggaaacaaactaagtgtccatcaacagacaaatgggtaaagaagctgtagtatgtaatcacaacagagtactatacagccataaaaaagaatgagatcctgtaatttgcaacaacatggatggattatggaggtcattatgttaagggaaataagccaggtgcagaaagacaaactttgcgtgttgtcacttacttgtgggagctaaaaattaaaacagttgaactcacggagatacagaatagaatgatggttaccagaaactggtagtggtagtgggggtggaggggatgaggggatggttaatggatacaaaaaaaccagaaagaatgaataaaacctagtattgataacatggtaattataatcaataataatttaattgtacatttttaaataaaagagtataactggattatttgtagcacaaaagataaatgcttgaggagatggataccccatttaccctgatgtgattattacgcattgtatgtctgtatcaaactatctcatgtaaccaataaatatatacaactaccatgtacccacaaaaataaaaaaaagatactatggttcatataagtgaaaacttgaagaaaactctcatatgggaagaaacactttcttctctttatagttagggaagtcagtgctttcctgtgaagagacttttacaggatttcagttccttggataaaaactatctaaaaatcctctctgttcagaataggggaggatcatatctcagactggtgtaacatctagtaattgaatattttaaaattttatatacttagaaattcaatcttttatgagtagtagaattcttaagataagtgagtattaataaatgaaagaggtggttaatgaaaaagccatcagagtatacatataacaatattagaaacatgaaagcccaagtattacaaatgttttatgcaatacaaattgtactttgtcccaagtagtgaacccttaattaataatatttgtctgtattgacatatatacagtctgaaaaacaatactggacttatcttgagtgtttaacaatatataataaattgttataccacaatttggggaaagctttaaaatatataatggttacttatctaaatctctgtttatttgtatttgttttagtttatgatagaaataaagaactctgctgtatcttgtataccaactgattgggtaaaggttggaaggtaggtttaaaataaatttttttcttacaatgcattatgatgacatctgtatatctatgtgctactgggctcatcgtagccacattcttgaaattaaaagcaattctttttacttattttttctgatggaactttttttttttttggaggggatgtagtcttgctctgtcacccaggctggagtgtagtggtatgatctcagctcactgcaacctccgcctccctgattcaagggattcttgtgcctcagcctcccgagtagctgggaccacaggagtacactacaacccccggctaatttttgtatttttagtagagacggggtttcaccctgttggccaggctggtctcaaactcctgacctcaggtgattcacccacttcagcctcccaaagtgctgggattacaggcatgagccactgtgccctgccctttcttatggaacttttaaccaaggagatcattacttttaactctttatcattgattttaaaacatttttcaaaaaggtatcttatttttacacatttattttcttgttttgtaaattattgctttatttttatagcacagggtacacatggaagaaaagttgaggaaccttcaattgtaagattaatttagttgcttttacttcatggtgaatgctatgcctgacatttcttttaagaagctgcaatttcattttctacctcactgagctccacatttctttattcttaatgccttccttggcacataattattataattctttacatctttttttttgtaacccagatcatgaattgatgaaaataaattaatcaaaaacaaatttagagaaccacattgggactctgccttttctccttggttagatactaatctccaggagaggactcatttaaagacaaggtattagggaagtatatacagctgtgaatagtatcttttgtggaatatttattagtactgttatcaataagttgcacaaacatgagatgaaaatggtacatttgcctcagatggtagaagagggaccgtagctggtaatagtgtacagacattctgttttaaggatgaagggaaattttgacataatgtgtgaatgattgttactttattacatatataatatatataatacatatatacaaaaaatataatacaaatatatatatatatatattttttttttttcttttttttaagacagagtctcttttcgtcagccaggctggagtgtagtggcgcaatcccggtctactgcaacctccgcctcccgggttcaaatgattctcctgcctcagcctcccaagtagctgggattacaggcacctgccaccacagacggcttttttttgtattttagtagagatggcgtttcgccatttggccaggctggtctcgaactcaagtgatccacctgccttggcctcccagtaatttattattttaacttaaaaagagaatgtttattatccattgccacatcatcagatgttgaaggcacaggcatggatttctttcattctaataccatctttttttttttaatgctaccagaagctgtactttagatttgagtattgttgattctaggggatgttttctctttttgcaggcattctttcctttatctgtttttgtcctgtaccacagctaatgaatgaaatatgcattatgaagagaaattaccaaaaaccatgttagtctatctacaacaataactgaaatatctccctaaatgagtttttccagaagataaagctttgataaatatgttggcctagaagtctagatgatataattttaaagcaacaagcaaggcataaatcagtgacaccatctttcacatgttcagtaatgtaaattgaatcaacagataagatagttagggaaaggttcattgcagtttatctgtttggccatagggttttgacagagatgagttagaacatcaggagtcagattttgaatgcaaaaggcccacccctaatccagcaacttggcaaattaaagtgcaacagtgtattacaagagttggggagcaaaaaaagaccagacaccttgaccttttcttcttgaagatttatcatcataatgacagcattaacagcagtggcaaccgccaccaccaccaccaccacaaccacaatacttacaggcgctctcctaagttttatttgtttgatcctgtcaacagtacctatgaggtagatattattatccccgtttcatagatgagaaaagtgatatttagagaaggtctgtttcatttgccccaaatcacatagctagtaagtaagtggcaggactggagcctcgacctggcttctctgactggggacccatggcatcccctgttgtgctctagctactgaacagagagcagagatgatactcaagcccagatggggagcatgtggtatttcttcctatccagagccactgtgaatctgcacagatcacagtatcctgaagatctttcttaattgcctcctgacttaatgcattgctttctttgtaatgcttttttatttttcttttttcactgaaatacttcaatcatacagaaaagcccataaaacaaagaataatacaaccttcaccaatgtatctacctcccagctttgtcttattttcttttaccatatatgcttctgatcttttttaaagagcattttcacttagtataatttaaagaaaaaagctttctgcctatgaaataaaagttctaaactctgactttgctatatgggtataatttgaaatgcattttaaaaggcttcctgagcaaagtcatattctttggaatcagtagagttcaggaccataattaaagaatgttcttctgtttacagctgtttactttcaaggttcatcagagaataataaataactaattttctaaagtgatggcatttcggattttttactaaccttgatttcctatttgtgttctttcccctcttctagcacaaaagctgtgagccgctttcactctccttttattgtagaaaattacagacatctgaatcagctccgggagcagctagtccttgactgcagtgctgaatggcttgattttctagagtgagtttacaatgaaaaaatataatctgactttttgctatcagaaacagactggaaaaatctttccatcaaaaagaaaatagagattacagctcatgacccaccataaaatagttgagtacatgtgttctctgattttatttctttttttttttttttacttttttttttttgatactgagtcttgctttgtcaccgaggctggagtgcagtggcacgatctcggctcactgcatcctccacctctcaggttcaagcaattctttgtgcctcagcctcctgagtagctgggattacaggcacccaccactacacccagctaatttttgtatttttagtagagacgggatttcgccatgttggccaggctgatgttgtactcctgacctcaagtgatccgcctgcctcagcctcccaaagtgctgggattacaggcttgaaccactgcacccagcccgaaagaaattcttaaaatctactgaaagttaagatgaccctctatacacccttcacctaggttcatcacatgttagcatttgccacatttgctttttatctctcatgtattttttttcctgaaacatttggaagtaagttttaggcattgtaacactttacccctaaatacttaagcctacgtctttaaaaataaggacattctactatataatcttaacaccatttattattacatctaaaaaaaattaacattaattttttttttttttttttgaggtggagtctcactctgtcacccaggctggagtgcagtggcgcaatcttggctcactgcaagctctgcctcccgagttctcccacctcagtcattctcccacctcagcctcctgagtagctgggactacaggcgcacaccgccacgccctgctaattttttttttttgtatttttaatagagacggggtttcaccgtgttagccaagattatctcaatctcctgaccttgtgatgcgccctcctcggcctcccaaagtgctgggattacaggcatgagccactgtgccggccaaaaaattaacattaatttatgaatatatttgaatttcttgaattttcccaatgtccccccgccaccggctttagattttaaaatgaaagacctaatcaacttttacatgttgcatttggtaattatgcttctttagtctgtttgaacctagaattatctgccacgttttttgttattttaccatggtattttttgaagagtccttgccattgtctcaaagaatgccttatattctggatttattgatagtcatgtgttcatattggcagttttaagtcatggcatgctggccaatgtttaacagccagctctttggaaggacagtcatgtttgtagagtttgctgatttctgtagtgtaaacactcccaccagggctgatgtcaagctaccactggactggagttgggaagagatgtacacagttgattttcatgagtccataggaaccagctctagaccaccactggtctgagtactttatatataaactcagtatttttcacgtgacccctgtaaggctaagtatcatacccaacttacaaatgaataaagtgagatgcagaaataagaagttaatcttccaagggtaagggttggagcccagattcagccccagccatccggcagccagatgtctggcctttgccagcctgcccatggtgagcctgcaggcatcagtctaaatacatctgttagtctctcactttaaaaccataaacaggccaggcgcagtggctcacacctgtaatcccagcagtttgggaggctgaggtgggcagatcacttgaggccaagaattcaagaccagcctggccaagatggtgaaaccctgtttctactaaaaatacaaaaattagccgggtgtggtggcatgtacctgtaatcccacgtaactcagtaagctaatgcacgagaatcacttgaaccggggaggcggaggttgcagtgagccgagattgcgcctctgcactccagcctgggcaacagagcgtgactgtctcaaataaataaataaaaccttaaacagtaaaaattcagtgacgtccttcagggagctttattgtatttcaagtaatcaacccgacaaatgaaaaaaactaaaaacaaaaaagatatgtgagaatttttacaagctagtaagttggtatcagtcttttgccctgaggagtcttgaattgtaagaccaggaagagattccaatttacttaaatcttttgagactagcttgactcagagtcttgaatggagggatggaaattttgtctattcagtttcttttctatttcacttttaattttctattttaagggttttcagggcctttgagtgtttcagttgtcctggctttttccttagtattaccactgagaatgtgaaaactgaactaaaattacacctttcagtcttcaaggactcacattctagaagggtcctgggatttggtgaggtaatttcatgttcattctattcagaccttacataatttcatagatctggcttctattctcttgtcattattccagactaaagaaagttgaggtctcccaggctaatcatcctggtgttattcttgattctttcttccttttggtccctttatctgttaccaagttcttttttttttttttttcctcgctctgccacccaggctggagtgcagtgatacaatcatgactcattgcaatctctacctccccagctcaagcaatccttccacctcagccccctagtagctgggaccacaggcatgcagtgccacacctggctaatttttaagtgtttttgtagagacagggtttctctatgttccccagcataatcttgaactcctgggctatgtccaacctgttatcaaatttctgattgtctttttccccctttgaggtgtttctttgatttgtcccttcttctgttgtcttctaacagcccattattacctcaaaccattcttactgtattggccttctgactgggccttctactaggttgacccaggagtttttattatattatccctaggctgtaattgagagttgcgaagagtgagctaacagtaaatataacatcatagaagcatatgatactctaattactaagtgaagaaaatcatgtaaagtaaaagtatgatacagttttatatgtgtatatttacataatgcacagcatacagacttttatatttttaaagattatatatgcttattattgtattactaatatgcttattggccatgtgtatatctttggagaaatatctattcctatatacatatgaacatacatacatatatatatgtatatgtagactcaaaatgttaactgattatttctggatggtgaggttactggtgattttaatttctttactttgcaaatgcagttggctcttgatatctgtgggttctgcatccatggatttaaccaactgcagattgaaaatattcaaggaatgaaaaggatggtagcatctatactgaacacatacaggctttttttttccccttgttattatttctgaaacagtacagtataactgctatttatttatagcatttacattgtattatgtgttataagtaatctagagatatttaaagtctatgggaggatgtacataggttatatacaagtactttaccattttatgtaagggatttgagcatgttggattttagcatctgcagggggtcctagaaccaatcccctatggatactgagggatgactgagcatgatttcagaagttcctataatgtacatatattactttcagaataagaaaagtgtattaaagtttttatccagaaaaagaatattggctgaaatttagctagagcattttgcaactagagcccccacttgagagcagcattgattgttatgtacactatttattgaggtaccagatggtgtgactatgatatcattaaaaaaatgattaacctcaatgaacctgacatcagaggattgaataccagcattacaaatgtatttgtcacttactgaggtactaactgttgtgcattagtcacattacttttgatcaaaatgttgtcagaaattaaggctgtagacactgctgtggattaaatcctcccttgaaacatgtctctcttttttttgttctagaagatggactgtgtatattcagtaatcttctcaattgcaaattatttaaaaattgaattatatcataaaaaattatagaaattcatttgcaaatattttcaatttttattaacttcagatatcattgagcaacacttcatggtaaacttctctagtcatcataacactataacagctttagaaccaaagtgtcttcatctgcttcctatggacccagcaatatcttttggccagaggttaaatcatagtgccttgacttcatccttaagttggttggtagcatagtgataaaattgcttgttgttatgctataaacccagtctaccagattgttatctgcattgaccatttttcagcttaccatttttctaagtatggataatctctttgaagtttggcaaagtgtatcaaatggacaaagaccaagatgtcaaacaagccttctttaagagttatgatgttataggtttatgatagtttttcattttattcatgtcttatttataccattgacatcagaaagagcattgttgttcatatcaaaataattacttatcccttcttgcttttttgttgttttaactgaaatgggacccactaagagctgtgttaactcatttccatcttaagaattagatcatcagagatagctaccctcaagtcaagctgctgagtagtagcaaattagagtcttgaggacctgggcaggacctgagaaggaaggaaagagtgagaaaaaaattgaccatttgttactgctaaagctttgatactcatgtccagagaggcaagggcagaaataccaaatatggctgctttctggcaaaagagagggtgcctagataggaggaccggatgggtcagtaattagaacaaagacagcatacgccacagtgcaagagggcaacaagtggtcagatctaaagtcagagccatggctgacgcagtggctcatgcctgtaatcccagcactttcggagactgagacaggtggactgcttgaggccaggaattcgagactagcctggccaacatggggaaaccccgtctctactaaaagtacaaaaatttgctgggtgtggtggtgcatgcctataatcccagctactctggaggctgaggcaggagaatcgctggaatctgggaggcggaggttgcagtgagctgagatcatgccactacactccagcctcggcgaaagagcgagactactacgtcgcaaaaaaaaaaaaaaaaaaaaaaaaaaagggaaataaataaataaataaataaagtcgaagccagagcaggaataacaaggcaaagtcagtgggcacccactcgggtttagggtgactcttaactctaaacacccagggcagttaggtcaatgcaacatgtggcatcttcaaaactagagagcattttattttgttttattttattaaatgtttgtgggtatatagtaggtgtatatatttatggggtacgtgagatattttgatacaggcatgcaatgtgaaataagcatatcacggagaatggggtatccatgccctcaagcagttatccttagagttacaaacaatccaattacactctttaagccactccaaaatacacaattaagctattgactatagtaatcctattgtgctatcaaatagtaggtcttattcattctttctatttttttggacccattagccatccccacttccctccacattttaaagtggtgactgagggctgcctgtctgatgctaggggcctgtccgttttgtgtttgtggttttgcacagattctaacactgttggtgggaatcgtattatttgttttgatgaactttaattcagtgagaaatagataagttatattcattatgttctatctactcagtaaataagtatacagtatactgtgaatatatttttcggttcacaaaaaacagaaataaagctggatagttaaaatgttgtttctagtatctggaaaaagtcatttatgtacaataccttattctaataatactagaaatatcagaagttacagttttaaaaagtcataatgattatataggaatagtccatcattctagtagtgtaatctggatatctttttcaagctaggaagcactgtagaaatctttggatttcagtagtaaacagactgtctcaacatttctgaaacccacactacaatagagaaatgtttttaaagagaggcatttattgtccgtttgttgtctttttcacgtttttggatcatctttaaaaggtcgtacagaatatctgagctacactattttttaaatgtagaaagtaggcaccttctgatccgtggtcagacgcgttacccattgcgctactggccacatgaaaaaatgctcaccatcactggccatcagagaaatgcaaatcaaaaccacaatgagataccatctcacaccagttagaatggcaatcattaaaaagtcaggaaacaacaggtgctggagaggatgtggagaaataggaacacttttacactgttggtgggactgtaacctagttcaaccattgtggaagtcagtgtggcgattcctcagggatctagaactagaaataccatttgacccagccatcccattactgggtatatacccatgacccagccatcccattactgggtatatacccaaaggactataaatcatgctgctataaagacacatgcacacgtatgtttattgcggcattattcacaatagcaaagacttggaaccaacccaaatgtccaagaatgatagactggattaagaaaatgtggcacatatacaccatggaatactatgcagccataaaaaatgatgagttcatgtcctttgtagggacatggatgaaattggaaatcatccttctcagtaaactatcacaagaacaaaaaaccaaacaccacatgttcttactcacaggtgggaattgaacaatgagaacacatggacacaggaaggggaacatcacactctggggactgttgtggggtggggggaaggggggagggataacattgggagatatacctaacgctagatgacgagttagtgggtgcagcacaccagcatggcacatgtatacatatgtaactaacctgcacattgtgcacatgtaccctaaaacttaaagtataataataattaattaattaattaaaaaataaattaaaaaaaagtaggcaccttatttctattttatttctatgtatgcacaaaaataaggcaagatgctagtaggagtctgtaaaattgcactgtgaagtagggtgataggaagagcacagtttgagtctaggctcaattgctttaggctaactgctttttctctctgaacttcatttgtaaaacttaggtaatgaagacctacctttatggttgttgtaaagaatatgtagtggcttcttcgtagtctttgattagtaaatgtttgttttcctttcagctttccttttggacctatttacagttagtttattacattttctcattttccagtctttgaagaatttgtgacttatcaccacctacttaaacattttttgtgcctcttaatctctcttggaggcagagtagttactataaagatttaagctcagctatatatttcctgttacttaaaaagatactttatacttggccattcttaaaaattaagttttgggtcctttttgtagtttaattatgtacacttcacacatccacaattgatcactacatacagatgtccacaatttatacgacactacacacattgacataaaatactatgatatgagataatgggataatttaagaaaaaagaaaaaagtattcatgtatgttttctgaataagtttttcattaaaagccatttaggcttttagatcaataaatattatagttttaagtagccagagacttgaggcaatgaccattatcttttaaaaaacaaatctgaaatttagtttttatatgcattattaataagataactgaagataagtgaaaaaagtaccttttccccttgtcttcaataaatatttattacagtgtttattttatgccaacattataaactagatgttaggtctacaatggggttaatgagatgagatagacaacctgctttcaagaagcttccagtttagtgtgagagaaaggtgttgaaactgttattccggatttggaggatgctgtgaaggagaagcacaagggaagctgatccacatgaatatttcatgatgttattgaagcaaaatgaaaatgactgctatatttatgttatatcttaagttcaaatgtcagggtcagatgaaatctgtgatatattcttaatggttgatatctttacatagaagttgttttaaatttatatacaaaacagaagcctcaataatttagttattatattaaaaagtaaagctgtttggtgtaatctccatctctcttaactgttaggaatgcctgctgatcatctgtatgcttacactagctgataaagtgattgcttgttgtagagctattataggtttaagatatcagtttgctcacctttttgttgttgctgctgcttccgtaggaaattcagtgaacattatcactccttgtgtaaagcagtgcatcacctagcaactgttgactgcattttctccctggccaaggtcgctaagcaaggagattactgcaggtaagatatttttcattttcctctttatcagtgctttagataagatgacattattcaattaattatagtgtctttattataaaatattacagttactcaaatgtgttagactcttgggaaagctgaatgtcatacatatgtagcttgatttgaaaattaaattcatttcttgcttcctctgtcactgagtacaatgaaagcagatgttaaagtttatgtgggtgacatttttataaagtttcagcactcttttcatttgttagcttttacttgaacacttttataattataaaagtttgattaggcaagaaaagactgagaagatagggactgaggggcattttagtgatctgttccttttgttaagagcccatattcatcccactattctttattgacctctaaacatcccaacatggaatatttattctctttttcataaaggatgttagcacaaacaaatctaactttaaaattcagatggctgggcgcatggctcacgcctctaatcccagcactttgggaggctgaggcaggcagatcacgaggttaaggcatcgagaccatcctggctaacacagtgaaatcccatctctactaaaaatacaaaaaaaattagccgggtgtggtatcacgtgcctgtaatcccagctactcagaaagctgaggtgggagaattgcttgaacccaggaggtggaggttgcagtgagccaagatcgtgccactgcactccatccagcctgggcaagagagtgagactctgtctcaaaaaaaaaaattttttttcagacaaaactttcatacaagttgtatgtcttccaaagcttgattttatatatacttaagaaaaagtaagactaggcttggtggctcatgcctgtaatcccagcattttgggaggctgaggcaggaacatctcttgaaaccaggattttgagaccagcctgggcaacatattgagaccctatctctacaaaaattaaaaaattagctgggcgtggtggtgcacacctgtagttccagctgcttgggacactgaggattgcttgagctcagaagtttgaggctgcagtgagccatgatagtgcccatgcactccagcctgggtgacagagcaagagcctgtctcaaaaaaaaaaaaaaagagagatagaatttaaaaaatacaaaattaaataaagttgttcaagttcaaatgttttattctttccaggaggcatctagattattcccttcactgccataggtgtcatcagtatgctttcttgctatgcgtgttctatcctagtgtatcctcccagctctgtgagttatcctttgcatcctattctgccaggaagcgttttgtcattatataattttgatagcaacagaataagtcgatgtaaattttagtgcagaaaaaatcacttaaaattttgttccaaagtgaaaatcttcctggtaaatcatatcagtgtcatgaatattatataatgatttcacttggcagagcacctaggattttattttaaaattaatgtcacaaatactttcatttttttcttttacaatgaatttgtaacccacctagacaaaaaatcttgtcttcagaattacactctaaaatccaaaaactatccttttttcataattttaagtgtctctctccaacagatgatttcaaagtatttactcagaagacactgtagtcactttttttttttttttttcctgagacagagtctcactctgtggcccaggctggagtgcaatggtgcgatctcggctcactgcaacctctgcctcccaggttcaagggattctcctgcctcagccccctgagtagctgagattacaggcgtgtgccaccacgcctggctaattttcatatttttggtagagatggggttttaccatgttggccaggctggtcttgaactcctggcttcaagcaatccacctgccttggccttccaaagtgctggaattatagacgtgagccatagcgcctgtcctgtagtcactttctttgcaaaatgtgagagcatctgggattttattagccagatatatttaagaagaataatttaggaaagtagtatttattggtgttatgagtaagttcagaaatgtggttacacatgaaagttctgagtcaaagaactataggaggtcattggtaggatattatgcttttgaaaaaagaccaatgaatcaccaagaaactgatgaaaagatgttcaatcttagtaatcagtgagtgcaaattaaaacaatgggataacgctgtttacctgttatgttgacaaacattagaaagtttaataataccaactttaagtgagggtatgagaaaacaagttaactttcatatcctgcttgtaggaaagtagattggtatatctactcttgtctattaaaataaaaaataagcatactctgtgacttaggaatcccactttaaaaatttactctagctttgggaaacacttggacttgtacacgtggagatgtgtataggattgttcattgcatcatcgtttataagtaagaatttggatgcaatctaaatgtttaacagtggaaaatgtgtagcagctttgaaaatctgacaagaagtgatcttcagtatactctactgtaagggcctattgaacctaatttcagtttcttaaaggccatctaaagaacaaagacgaagtttactttttttcctttaaaaaggagagtaaaacttactctgtcttacacttaccatgtgggtttattggattgttttataaatgtaagatgcattttgggatctttagtgatcttattttttctgtatcttggaacattttgttatttcttcatcctgagtattgttttaacattgtttatcatttgtttcaactataatataaaagtctaaaatgaaaagaaaatgagagaatgatgatgcagaagtgaggggagaaatcactatcacgtcatccttctgttttcttcttgtattgcccgcattacatcatcttccaagaaggtataaaagaagagtgcagatgccacagttggagtctgcttctaattttcattgaacacagttgaaaattcagaatttttcgttgttcacccgtaaaggcaaagagaacaaaattgacagaaggcctttcataattattagcttaatcagatgatgaatgtgaagagaaaaaaaccagtgccctgcatattcatggtgatggtgaaatttcatgtatcagcaaaatctgagattctgaatgctcagaaaatatcctaggtgaattttctcaaactcaaaagttggtatgtgaataatatatttgtaagggcaaaatgaactctgttattctcgtccagttagtcattcaataggaaacattcatcatgtaatatttggtgacaagaacctggactgtcctgttttgctgaaagatgtgatagtattcttctatcttttataatatttattcactaaaatttacttgatacaatttataggttacaatttatagacagacaggagattgaaaggatatagatgatgtagaaataaaggtactcatttgattattctaattggtgttgataagtcaaaaaatgaaaatattttgcaattatggagcaaagatgaccatctctttaagaaaattatgagctttaaaagatttcaaaaacttcttcaagtatttgcatttttgttgatacaaatgtgaaaagaatcagaaataatcagctctagaacctattagaaatgtattgaaatttggaatttagtatttatgaatgaatatgttctagatgcatgcttgacggctgatgagcaatgacattcagaatgtcttacccatttcagatatatatgccttgaaaaccaggagaatatggaataaaacttttgagatttgctgtgtttaaattcttattaaaatttgtcatgaggttgattttttttactatccccttattctcatttctgtaaaattatttgtgaaatgactttaaaggaatatattaaatccagatagtaaatggtgaaatctattttttgtgtgtgtactgagagttaaaataaactttgaattttttaagttacagaatgatagattacagtatgacttttccaaagaaatcacaacgagtgtgatgcatacataaacataaatgcacagaagaaggttggaaagggtagacaccaagctggtctcagtagtaacatctgggaaggagagctgagagtagggcagggctcagaggtgcttgaatacacagctaaagctgtagataaaacagatatagaggtctttaaaaagcataaagaacatcaaggtcaaaaaatgattcttgtatcaaagtaaaagatacaaaagaccgtagaaagatgttttaattgaacagcgtatgaaaattttaggtcatttcatttccaagtccaacacatagtttatattaataattacatctagaaataattttatgtgatttactttattgtattcattaatgaaaataagtagcaataatctgaactgttatctttactaatgaaaatattggtttgatctcagacaacaatagaaaaatgaagaataaagcccagcatggtgacatgcacctatagtcccagcctcctcaagaagctgaggcaagaggatcacttgagcctaggagcttgaggctgtagtgtgctatgattgtgtctgtgaatagtcactgcactgcagcctgggcagcacactgagaccctatctcttaaaaaaaaaaaaagaaagaaaagaaaaaaaagatcttgtaaaggtaaactacaagggtgaagccatttataagactcttctaaagtatgtgcttcagtgcactattataataataaatgttttcccaattttgatcttatagttcaaatttaacttttatactcaaggttttattctggacatatgttcttaaaatctatgtttaaagttttgttttctgtcgtacaaacagagtactgaaatttttcatgctatcttagagttttttttttaaggctatttccatgcctagtaaattgaaacatatttcttttttgcagaccaactgtacaagaagaaagaaaaattgtaataaaaaatggaaggcaccctgtgattgatgtgttgctgggagaacaggatcaatatgtcccaaataatacagatttatcagtaagtaccttatgccaaaaaataagtcgatgataacatcccaaacttttacataccaaagaaacatttttataattaaaagttacccaaatttcaactttggctttaaatgggctaagcctggacatagttttatatttaccacgaaatgtggaattggtgctatttccaatgcaagattatcaataggtttagtaactaaaagtttagttctaattagttatcctaggtaacccaataaaaatattttacatttgtaaatacccaatatgcaaatagagttggaattataccatagttttgcaaattcatgttagcatgtagtgttccatcctttgtactgtgactattttcagatattctatgcaagaatcagagatgcctttgcagattccagtgatgagaattttcattataggggctggatttctcttacataacacaaatgatcctgaatacttaatttacttaacacatacttactgagtgcctgtgtctcaggtaatgaagtattaggaacagagactagtaagcaagacagaactcttccctgccctcacagagcttgttgtatagcagagaagataggctagtgcaatacagcttagtgcatggcatgatagaggagaccaggatggcctggggataggtagcaggttggcctaacccaagggcagggaagcattgaggaatgttccccagggaggagataccaactgaagaatgagtcagtgcaggccaaggtattgaaggggagtattccaggtagaagaaccagcatggcagatattggaagtgaagcatagcaggaggaattcgaggaactgaaagatgatgagtaaggttggagtgcagagtgtgaacaaagaagtgttcagagataaggaagaggccagttcactcatatcaagaaatttgcatttttacccctaaaagattaagaatactagcaagagagtgatagaagctgggtaaaaatagtgaagttatggcagggtgtttgagttccattgtcaaagctaaatggagctgggcactgaagtggtaaggattgatcttattcagtaatactcctgcatagggaagagtccagtgtgaactgaacttgacttcattttggcatagatgactgggtgttttaaagggaatacgagggaacagggaaagggaatgagctgggggaggagagagagtgaggtgtggttatttgaaacctatctgggtttactaattgtttgcttataccacatttcaaagagtcagctctctggtccttaagaagacaattctgggtgatagatttacatcacaaaggggcagaaaaagtatttataattgcaagctttctaaggtaactgttctaagaagggcttcagcatctggctgcctgtcaccaaattttggctggaatggcgaatcctggcagcactgagttttctcaggcagatacttttagtggggctggggtcatcctaaggatgcagccttgagctgttagaaactatgctagtggggtaacttctaagtagggagggtggacaaaatcatttttactcaaagtctctaggtttttataggtcaaagttgagaactagtccagaagagggctcagagaaaaaacctgatgagaatttggtcaaggacatggggtaaaacggtatggtgatgggtcaaaaaatgaatatgtagggagtagttatgtgagagagaaggtatcagagaataaaatgcctgactttcagatatcaaatgtgctgtttttctggttgatggcaagatcttatgtatggctatggaaggtgggtagcagaagggagaaggtctttggagatgaagagatcaaggaacagagtttgggaaaaagttgtccatgtgaatgttgaaatctaagataacagcaagatatgccatagaggaaaacagggatccaggtgtctgagattgcgagaaatggcgattgggaatcctgaagtttatagatagcttagattgaggacagacagtggtaaagccctaaagaagagcttctgaaccctgaaccctgaggtacatggtccatggttggatgtggcagaaaggtcagcgcccaaatgagagagctgcaggggaataacaaacagccagccagttttcattttagtgtatgaaggaaatgttaagcaaggtggttagaaacagaagtactaaggaactcttctgaggacagtgaaagaattgagatgtaggggagcatttggaatgtagatcagagaaagctcagagtagtagcgagctgggactgtaacagagtattctacctcgggctgtgagcagaggtggcagagatgtgtggcatggtgcatttggctggccatgagagggggatgtgaagggaaatactttgaatgacatctagtttaatttataatatggattttcatatcataacaagacttgttggtagtatataatgcatgtcttagtctgttcaggctgctgtaacaaaatatcatagactgagtagctcataaacaacagaaatttattcctcagagttctagaggctggaaagtccaagatcaaggtaccagcagattcagtttctggtgagggcctgtttcctggttcctagatgacacctcacatggtggaatgggtaaagggtctcttactcatgtattcacacagtggaagggataaggggtctctctcaggccctcatgaacttgtcatctcctgaaggccccatcttctaataccattgccttgagggttaggatttcaacatacaaatttgggagagagacaaatattcataccatagcaacctaagacccaatgtctataaacttgttcattcttttttaggaaatttttatatgtggtagtcaaacaagttaataagtaccaatctttttattgtctttaaaaagaagactatgtctttgagaggccgaggcaggaggattagttgaagtcaggaggtcgagaccaacctggccaacatggcaaaaccctgtctctactaaacataaaaattagctgggcatggtggcgcctccctatgattccagctactcaggaggctgaggcaggagaattgcttgaacccaggaggccgctgcactccagcctgagcaacagagtgagactgtctcaaaaaaaaaaaaaagaagactatgtcaacataagaattttttttttcagttctcataataccagtaggatatagcttttcttgagaaagtaatataagttaaatataaactaagcaactaaatattagaactataagtttcttaaaataatttcctgttactgtttccctgcccatctacttgacctcaagaatattacccttgggattgacttatttctttttttctttcctttttcattctttttctttcaaaacgtatgttacactttaataaagcaagatttgaagaactaaaatagccttctgtctaattacaataatgttttaaagaaacattgaactcttacatttaaatctttacaaagtaaatggagtaatttttttttcaagcaggcacctcagaatattccagaatattcgtttctattacatatgctttttctaacttgagtaggagttgatatagaactgttgctatggtgaagtgcattctatttttcagggtaaaaatttatatatagggatagtgttgagaaagaacttacgtaaaattcaatttaaaatattttatggatgttaattataaaatataccctgaaaataatttcaaagttaaatgacattgttgtttttgataatcatgtggttttaagaactggtgctttgtacatgtaactataagtatacttttctgtattctgtattacatgaacttattatagtgcttctgaataagccaactttctgcccgcttttcctctcccagttttaagaatactttttaaaatactctttctttttgtccccttccttgattcactatataatccaagcatttatacatgtggtcaccgctggagctccctcctccaccctgcccacctccatggattctctactctgcagccacagggcttctggaacgtgccatgccactctcccttttgaattcatacttcacactccagccagattggacttcatgccgttcccaagtcactgtgcctctgggacttggcagatggttttccctctgcttagaatgtcatctttccccaccccacccactcccgcctcacacactccaacatccacccacccaacacccacccgactccccagctctggcttgttcaagtcttgccttggatgtcagctcttgcactcagccttcctttgcccagctgggatgggtaaccctctcacataccctcgccactctatttctccacatctcagtacttattccaccaaattataatcattctttttttatctgcctttcccagtggactgtaagcatgaagagaacagggactacatctctgtcacctatgtgtaatcccaggatcagtcacagttctctggcacatagctggcacctaatcagatttaataaatcagtaaggattagctagaagccttcagcagtctccaagtctcacttgaaatttttgccttttattttctacacaaaatgttttttttcaggatattatatggggattgccccaatttacagaataattttactgtcaaactaaaagggaaatttgggatcttttagtgtaaccacgtcttcatacttctgagtaaactatggttcagaaaggggaaatgatctgccagaggttgctcaggttgggtcgtcttgaactgtttcccaaaacataaacatattttaaggcaagccagtgctttccaacctttttcactttgcatcacacagaaaatgatagtattttaatggaacactggattaaaaggagaaggaagaggttgctcagaggccaaggaggctggcccagggactgtggccgccccagccccacccaccacctgtgggttaaggggtcagtatcttggcacccctgtcaccttgtgaggcagcccaggactgctgcttagggaaaccccagcgaacccactgcaatctcaactctcccaggattgtttgttaaaccaaatgactcttttttttttagtggatggattttcaacagcagttaaagtcggggttttcagttcatttgtagggtttttgtttttagtataaaaaatataaatttcaactaatggaggggaggggaaagagtggttgacagcttctcagtttgttgggtgggaagaaaatgagtcaaacgtgcacaacaggaagattcccaggaagcactcgaaccctgtagctctctagcccaagcagaattcacagcccaggtgttttattgctggggcagggtagacattgagatgctagtcacagtcccttcttgtgagatcaagatgggcctagggtgcttcagtcattagctccgcatgtggtatggaatgggtgctcacacatttgttacatgaacaagtgcttgaagctggtaaagatgaacagatttcccaattccttcccttatctcagtacaaataatgtctagctggcccagaaatacttgctttggctgtataaaagtttaaaagactagttacagtaatattcataagctgttgacaatttgtgcctaattaccaagtggaacagtaataatacataccataaaatatgtctgagctttaagcttaatttaattccatggctaaattatattctcacagattctgctgtaaaggtgtttttcacatagcatgatctttgaatcatgagcccatggattaaaattctaggaaacattaatggcaattgaatattgttttcttgtcagtcctttcctctggttctcctctctcctgcttctgaaacaatggatagagaaggacatttgtctgataaagtgttctgacctgcactgctgtctctgcccagaatggccctcccctctcttcttatctcttacctgtctgcattgattggactcacactgttcctgcaggacccaacaaaacactgcctcttcctgagagccttcaccatcctctggccagaaaaaatccctttctattcaagcactttctttgctctgtttttaaagctctcacatactacttttgttacacaagtgtagtgggaaagtggctcacaatggtaggagatttaaattaaaatcctgctctgctgtcatttcactctcattttggatagaccacgattacttgctgggccttagtttcctcatctgtaaaaggaggtggttaagctgggtcacagccagccctcacacccaggggaatgtaaattgggcaggatccaggtgttggagggatttaagtcctgactttggcatctcaacatgcagctggtgccgctctccagcttcattttccctctttctgtttctagttcaccttgggttaaaagtgcaaagatttggctgagagctcgtctggaggaggctttgactcaagagtctcttaccataacctgctgttgattgacattttcgaggaataaaacactttgaaactaccaaactttttcagcagtctgcagctgttataaaaatagttctcccataattcttctttaaagacagttgtcaatatttatacctgtcaaggaagatagcacttttttttttttttttttttttttttttttttacagaaaattagcttttcaggtcttagaaattaacatgtgacagttttattttattttttttctgctgtacatctgctgacttcagggatattatgactgtccattattctagtgtactcaatgatgaacacatggagtgaaagcatgtcttctcctatttagtagtgactatgattccctgtcattgagcaagcgtccccattgagacatgtcagaggatgaacttcacttaacattccagttctgcgacttagttgctgggaaagatatttagctttaggcctctgtttcctcacctgtataatgggaatccagtaatattagtattaccctgtgacattgttgtaagaactaaatgaagtgatacatagaaaatcattagcacagtgcctggcacttgttatctgtgattttcttaagatatcttgaagtttgtcttttatttttagatcttctcttcccccacagaagttgacattctatgtggaagttgcttagttatcacaagttttgactcactgtttagatactggataaacaatactaagatcttattgattgatgctattcagacagatattgccaatactaaagggaacacttaatagaatgtacttctagtctcttcataggtttgccaaggcagtcctctctagttgttatccagcaacatagtcccttcagcgcaatacttccagcttttgtttgctatcattaattaattcattcatccccctttagtttcttgagaacttgctctgtgtgtggcctccttaggcttggtgctagcccagctttgggcactgtctaggccagtctggtattcccagtaggctccagagtgtgtggagaggtggttattgccaactttcagattctggctatttggttagaacattcactcatgctaactggtcctgccgatagattttatgtgtcttttatatctgggaacccttgatgtgtgctgcctcaaatacgcacgatctttctaaaagagattagcacattagatgagtgaaatttcttgaccatttccttacttattgtgtcatcttgggaaccgtggaaacaagggggtcatatattcttgacagatttttatagagaaagcaaatgattgtttttgaaatgtaaacatggtggaaatctctgctgtaatgccttttgtgtattacattcatctctttgatctatttattgggtgccttctttgtgccaagccttgttctaggcaacggggatgaactagaagacacaattcctgctctcatgagaacttactttctagaagtgagattggtaataaataagcaagaaaattcaggtaatttcagagaaggttgaaaacaaaataaaatgggctgatgtgatagagaatcacagagcagaggggcttctgtagattgggtggtcaaggaaggtgtgtcctgggagttgatgtttgagtgtagacctgtagaaaggccttaaggcaggaatgagcatgttgtattctggcaggtggaaggagagcagaaatcaagtctggctagcaccaagtgaacatggtggagggtggtagaagaatggatcggaggcagacatggcctttagactgtgacctttagacacttagaagtgctctgaggatctggatgagggcttttagcaaaaaacaagttctgttttactttttatgacagtcactctggctgccctatggagagtggattgtgggcagaggagaagcaggaagacccagcaggagccactgcagtcacctgcctgggcagtggcactgggcatggagacaggaggttttatttacctagaggacctcctgattcttcagtcttgtgtcttttttcctgctggtgtttactagagtgcctgatgtacaacttatctcgtgctggcagtctcttagggcttactaagaaagccaccatgttgtcacctacaaatatttgagtttagtgggttgaacacatttaacttctaaagccttgaagttagttcttctttgacatcctcaaatcctggggcaggggtggtgggggctggaaaaaatctgtctctacaacagtatccccaagtctgcccaggttcaccatgcaccacttttcccaggtacttcatgcaaacgaattccacaacttctcatcttccaagcaaatctggcacagagctctggtgccaatttaattcctgctctttcattccacccagggccacatattcaagcaatgtacctgaatttaggatgagagatcttatttaattcaactccctgattttagaggggaggaaactgaagcctagagaggtgtattggcttgtccagagtccacactagaaaccacctttcttttgtgggccaattctttattcatgtttatacttttattttcacactctgttattttcttgcttatcaaggctctcatagaaattgacgccacagtgaaaatttttgtataatacttgacatagtatgcattcaatgaacaaatggttgttagtactctcattgctgtagaatccatttacaaataagtgttagattaagatttgaaatataaagaaagggaggaaattgctccttaattccaaagatagccactgttaacattttggaatgtttcctttgtctttctttgtaattttttttaagaaatagccattttttatataaaaatttttatatcctgctcttttagttaatattataacatgaatattttcctatattcttaaaaagtcttaagataacttttaatggcttcatggttttcaacaatatggatataccataattgccttaatattttctctgttgtatctactctttgctgtcatgaataatcctgccatggtacctcacagaattgattctttaaaaaaacaaaacaaaaattgggggcacatagtaggtgtgtatatttatggattacatgagatattttgatacagacaccgaatgtgtaataatgttaccctcacatgagggtaactggggtatccatcacctcaggcatttatcctttctttatgttacaaacaatccagttatactcttagttatttttaaatgtacaataaattttgttgactatagtgaccatgttgtcctatcaaatactagatcttattcattgtatgtaactatatgtttgtacccaaggaccattcaccttcttcacccctactacccttcccagcctctggtaaccatccttctgctctttatctccatgagtttaattgttttaattttcagttcccacaaagaagtgagaacatgcaaagtttatcactttgtggctggcttatttcacttaacataatatcctccagttccatccatgttgttgcaaatgacaggatcttattctttttttatggctgaatagtactccattgtgtagtgtaccacattttctttgtccattcatctgttgatggacacttagtttgcttccagatcttggctattgtgaatagtgctgcaataaacatgggagtgcagctgtctcttcaatatactgatttcctttcttttgggcatatatatatatacctagcagtgggattgctagatcatgtgttagttctatttttacttttctgaggacctttaactcttatccataacagttgtactaacttacgttcctaccagtagtgtacaagagttaccttttctccacatcctcaccaacatttgttattgcatgtcttttgaatatgtcattttgactggggtgagatgatatctcattgtaatttcgatttgcatttctctgatgatcaatcatgttgcacctgttcatatgcctgttgtttgtatgccttcgtttgagaaatgtctattaagatcttttgcccatttttaaattttttttcagtttttttcctgttgagttctttgagctccttgtatagtctggttagcgttcctttatcagatggatggtttgcaaatattttctcccattctgtgggttgtctcttcactttgttgattgtttcttttgctgtgcagatttttatttaataacttgatgtgatcccatttgtccatttttgctttcgttgcctgtgtttgtggggtatttctcaagaagttattgcccagaccagtgttctgaagattttccccaatgttttcttctagtagtttcatagtttgaggttttagatttaagtctctaatccattttgatttgatttttttacaaggtgagaggtaggagtccagtttcattcttctgcatatgggggtattgaagagactgtcttttccccagcatatgttcttggcacctttgtcaaaaatgagtgcactgtaggtgtgtgaatttgtttctgggttctctattctgtttcattggtctctgtgtctgtttttatgccagtaccatgctgttttggttatatagctctgtagtataacttgaagtcagataatgtgattccaccagttttgttctttttgcttaagatggctttggctattcagatccttttgtgtttccatataaattttaggattattttttctatttctgtgaagaacgtcattggtcttttaatagggattgcattgaatctacagattgctttagttactatggacacttaaacaatatttattcttccagtccatgcatgtggaatatctttccctttttgtgtgtcctctttaattttttgcattagtttatgtagagccctgggaccttgaatgaacataggttgtagtcagacagtggtcaccatgggccttgggtgagacccagtgttgtgatggcttcaggtctgacccagtgagcattgaagaattaggtatttattgtagccttcacagtctagcttgtttgtacttgttcttgggaaggctttccaagtattcaaagggacttgagtgttctgatctaaatctgtggtcactgcagctatgtctgcattagggggcaccccaagtccagtaatactgtagctcttgtagactctttgagttaccaccttggtggtcttgcataatattctggaaaattccctggatttctaggcagagactcttgttgtcctcctttactttcccccaaacaaacggagcctgtctctgctgagccacctagagctgagggaggggtgactcaagcacctctgtgaccaccaccactgggactgcactgggtctgacctgaagccagcagaatactgggtcttacccaaggcccgtggtaaccactgtctgactaccatctatgttcactcaaggtcctagggtctacagtcagcaggtggcaaatccagcctgaagggctatcattgtttataccaccatgcctggcaatagtgaatgatactctgggagggaagtaattaatttgaccttaatgatatgtatatgattaggcagccttgttctttgttagccttcaacaatagggatctttttggtcactgtcacaggagtgaagacagaatgacttaccttgtaatgtttgttttctgatacattgggccaaaagacccacaggaatccacccgtcatctccagaaagtgaagtttttatttgaagtttgttctagtgtaacaactttcatcacatttcatgtttcaatagatgccaaagcaaagcactgagtgtgttggtatttctgttgcctgcttcagcagtgtctggctctcaaagttgtagccttgctacctaacctgagaccaaaatagccaagagcgttaaaactggtatgtgggttgggaaacaaacatagtgatcaggcaagccattttagaaggggtggtggaaaaaacttctccatacacttaagtcttcttaatattattttttacttttcaagcatctaaatttcccctaatgcacacaattaaatactgaaatatacattagaatttattcattagaaaatttgagatactctacactttaaattgaacttgtaccgtagaacttttaaatgattaggaatgtatgttttatagttaaaagagattacttagagtaattttttgtcttcactttcaatatgatgccccccccccctacctttttttttttttttttttgagatggagtcttactctattgcccaggctggagtacagtgtctcaatcttggctcaatgcaacctctgcctccagggttcaggcgattctcctgcctcagcctcctgagtagctggaactacaggcatgcgccaccacgagctcattattgtatttttaatagagatggggtttcaccatgttgccctggctggtctcaaactcctcaagtaatctgcccaccttggcctcccaaactgctgggattacaggcgtgggacaccgcacccggccccaatatgatgccttttgatgacaaaaaaagccttaactttaatgaagttgaaggtatcagtccttctttttatgggtgaatgcttttgtgccttaaataggaaattatttcaatccctgaggtcttaaacatattctcctataattttttataaacattttaaagtttaattttcaaatttcagtcattaatcaatctactcagaatttatttatttacttatcttttgagacggagtttcactcttgttgcccaggctggagtgcaatggcgcgatctcggctcacagcaacctccgcctcccaggttcaagtgattctcctgcctcagcctcccaagtagctgggattactggcatgtgccaccacacctggctaattttgtatttttggtagagacggggtttctccatgttgataggctgctctcgaactcctgacctcagatgatctgcccgcctcggcctcccaaagtgctgggattacatgcgtgagccactgtgcctggcccagaatttatttttatacatgatatgagttaggaatctaatttcatatctttctatatggataatcaattgttttgtaccagttttcaaatcatccttttcccatcagtttatggaattatttatcatatattaagtttccacatttttatggggctgttctgaactcttatttttcactggtcagtgtttgtgtgcaagccagaatcacacaagcttatttgctatagcattataataactttttacatctgtagggaaagttctcccctcctattctcctaatagaattcctaatttctatttagcttttgctcctctctctattttagagtcaacttactcagttaattgggggaaaaaaattgagatttgtattggaattgcattgaccctatagatcaatttggggaggagttgacatctttatgatacatatgtgaacatatgaatatgtccctccatgaaaccagtagatacagtcagtcctcacttgacattatcaatacgttcttggaaactgctggctgggtatggaggcttacatctgtaatcccaggacattgggaggctgaagtgagaggatcacttgagcccaggagttcaagaccagcctgggatggggagacctcatctctacaaaaaaattacctggatgtgatggcacccacccatggtcccaactactctggagactgtggcaggaagatctcttgagcccagaaggttgaggcacagtgagtcatgtttgcaccactgcactctagcccaggtgacagagcaataccctgtctcaaaaaaaaaaaaaaaaaaaaaggaaaaggaaataactgcaactttaagtgaaatgacatataatgaaaccaattttaccataggctaatggatataaacaaagttaaattcctatgtcatatttctggccacagaaaacatcatcaaacttctaaataaagacccaacacacttctaatattaaacattgaaaaaagtatgaactatgtgtttaagaaagattaataaaaacaaataagattattggatacacaatttttggtaaatcagggagtgacagaggtcatagtgatggtgggttaaatcaaggaataaatgtttccatagtgaaaattgtgagaagtacctcctactaccatgcagctcaaaaacgagtaatacgtgcggcagatttgtttatcacttttgtgttacatcagtttattgtcatgcatttgtatgattatcacctgccttatgaatttttacttgacaatcatttgtattcactcattttccaacccacttattccattttggagtcatgggtagccagagcctatcctggcagtgcagggcaccaggcaggaaccagccctggacaggatgccatcccatcacagggcacactaacagatacccacctcagaccggggctattacaccaatgaacctaacttgtacatctttggcatgtgggaggaaactggaatacccagagaaaatccacacaggcatagggagaatgtgcaaacacagtggccaggctgggaattttttttcccttatcaattttgtaatgaaatgacattatttgaggacctgctgtatttttattttggttttaagtcctttcaataaattttaaaagtgttctctataaagggtttttacatcttttattagattaattactaagtactttttgttagtatataggtcatatcttttttacaatagtcttctaattatttgttgctcttacagaaaaatgcaactgagtttgcatcttgatcttaaatctagccattttgctagagatcctctcattaattataatactttgtatagagattccttttggttttccttgtggacagctatgtgatctgccaatgacagttttgttttgtcctttctcatcctaatgcctttttattgttatgtttttctatctgggacctccaggaaaatgtggatatcgtgtcttgattgacctaaggaaaggcttctaccatttcaccattaagcctgtgtttgctgcaggattttggtagctagccttgacctggttgaagaagttgtctaagggtcattttgttctctcactcactcaccacttagtggtggatggtgtcgggaagaaacctgtttcccagctaaataaacatggtttaaatattagagctgtgaagtctaaatttttatatgatattttttctatatatacaaagaattgatttttgtatatcaattacctctgaaatcctgaagttcaaataaactaaaaacttcatcattccctattaaattcaggagaaatgaaatgctcaaagaacatatacatgattgtatagttttaaaagccagcagtttctgtgtagttcaatataaaaaatgttattccttttgaaaatattggaaagggaaagtgtcagacttacttactttgggtaatatatcttcttcatatatatatatatatatatatatacacaatctaaattcgaagagagcaatatttctattcatgtaaatgccatacacattttactcatcaaggccttcaaataagtttcacatctgacttttacattaggcctaagccaaatgtattttcatttgttttagttcatttcttctgtttcagttaattagtttatagggcattgggacttcatgtggctgctttgggcatcttttatttttaagaatttatgatttataaaaattatagcatttatagtttcaaaggaatttcatatatattttcttaattgttttaaactttacaaaatgcacgtaaggctaggatttctgttatttttaaattttacagatgagaaaatgaaatgtatttagccaatggctaagccagaaatggaacctcagtcttctaactctaaatggtattataatatgctttaccactacaaatcttattaaattattttagtttaccaagttaatacttttaaagaatacactgtcaaattattgattcttattgtgtgaaaaagccaaattgaacaataagtataaatactcttatctttcaaggtattggaaggcataggtttctacaaaataaaaagtgtatattttttctttttttctcatatctttctaaactaccgatttaaaaacatttctatttctgcatttccattggtccctctcatgtgcttgttgaatttggtaatcccatttgagacagctcctttaacaatgctgtcacagttcagggagccttggcatgacacacgtaacccttctgtgcggtattctctctggcattgcattcttacattacattctctctggcattacattctttcactttccattttgtacttttctctattgctttatttgtatgtaatgttctgaagtccaaataacaaaatgtcatttggaagttatgtgaattattcctaaattacataaatgtgtttgtaaggagttattgaattgtttgtgatggtgatccatgaaataactaagaaaatttatttgattttttatgatttcagccaatgaaaaagtatataaaacagtataacagacacctatttacccatcacacaaatgtcgtagagattgacgttttgtaatatttaggagttttttaagtaaataaaaaattgcagatacagctaaggtcatacgtaattaactgctattcctttttctccatcttcatctcctaacctacatggtaaccattatcctgatgttatttattatccttatgcatggtttttattcttttgtttgacatacatatatatatatatatatatataaactagtagcatataatcatgttttgtgtattttaaaaaaggtacattaatgtctcactgagcttatcttagtattctgcattgtaaataattgttttaacaattgtacaagtagatctatttattttcctcacattagacaattagattatctctatttttgtcagttatgaatacatacaaacaatattacagtgaacagttttatacatgcctttttgagcacttgtatgtttcttgggtagatgcttaaaagaggaattgctgggtcatctagaccaatatacacaatctttaactttgctaggcgtttccatattgctctccatatcttgacagcatactgtgttgaaaagactgtcctttgtctactgtgctgcagtgtcacctttgtcataaatcaaggaactgtatacatgtcaatctgtttctgtgctttccattccactggttagatatgtatgtcattgtgccaaatcacactactgtaattactgtagcattataatactgagtcatccagttcatgaacatggtatattccttcatttaattaggtcttctttaatttctttcaataatgttgtgtagttttctgtgtagagacttgctcattttgttagatttattcctaggtatttgatttcttttgatactatggtaaattgtatcattaacaatgttttattttgaattacaggttgggcattcctaatctgaaaatctaaaatctgaaatgctccaatgagcatttcttttgagcatcatattgttgctcaaaaagctttggatttcagagcattttagattttatttgtaatgcaaatatttcaagataaaaaaaaaattgaaattggaaacacttctgtccccaagcgttttggataagtgatactcaacctgtatttgttgctaaaatataggggaaaagttgatttttgaatactgaagttgtatccaaaattcaatttttatagatttccttggattttctgggagcacaatcatgacatataggaataatgagttttattatttactttctagcccttataccttttatttttatttccctctcctgcccatttgtttcacaagtgaatgttgaattttatcaaatactttctctgtgttattggagataattgtatggtttctttattctgttaatgtggtgaattacattgattggcttttgattattaaaccaactttgtattcctcaaaagctctaaatggtttgtataaccttggattgacttattaatagtttattaagaagttttgcatgtatatttatgggtgaaattggtctgtaatttttcttgtaatgttcttttcaggtttgataagatatccaaatctgaaattatttgggaaaaattcttgttttgttctctggaagaatttttgtaatattcgtgctatttctttcttaaatgtttgcaagaattcagtagggatgttctctgcatttagagtttttcttgtggaagggcttttacaaatgtaataaatataggattgttagattttctatttcttgtgtcgttttgtgatttttaaaaaaggagatagacatattaaaaaagagattaaaaagagattaaagagattaaaaagagatataaaatatttgatcatgccaatatttgattgttttatgacaggcttattttttaatctctgtagaattcattttatttttatcattatttttatcattgttttatgacacgcttattttttactctctgtaaaattcattttatttttatcattagttttatcattctgcttataccaaactactttccaggttcttattgtgttaagctctttctgtcacaagaaacacaggtatactcaagttccttcaagtaatggagatatattaggtgcaatataaagccatatggagccttaagagaaaggaattacacaggaagagcaggatctctagcacagtttggcattagggagactggaaatgtgtggctaattagaatatgatacagctttagggatggaacaggttttctttttatcccccattagtaacatgttataaggctttactttgatacccagttgtttgtgtgaagtttctcacttccttttggcttttgtctatcttttcttcctttcattactaattaccctctttacccctggtctaaataatttttcatcataccttttattttctcataactacttacttatgatccccagtgccttgtggcctggttctgtgattctttttagcctctcttcaagttaccaagtaattgaacctcactggttctcagttaactcccaaaagattatttgattggcctagtttgagaagcttttatgctagctaggcccattggctggttctggctttttttttttttttttgagatggagtctcactctcacccatgctggaatgcagtggtgctgtcttggctcactgcaacctccacctgctggattcaagtgattctcatgtctcagcctcccgagaactggcatcatcacacccagctaatttttgtatagttggggttttgccatgttggccagcctggtcttgaactcctggcctcaagcgatccacctccttggcctcccaaagtgctgagattacaggtgtgagccaccgcgcctggccagcttggctactcttgaccagggagctattgccaaaatgtgggattcacatagcccagagcatggatgccctgggctaactcctctgccaagggctgtagttggacagtttcccttagcaggggtgtgtacctggaaaatactataattgatcagtacagataagtcctagaaaattaagttgttgcaagagttacaattctgcctcgttcacatgctgtggtgaatgctagtaaataattaaatgctggtaaaccaatgtctagaatttgatgttatatcttttagtagtcatctacctataactgaaaaattgctgccaaaaattacatgtgctgccaaccccaaatagggccatgggcaaatagatatgtaatacctgttgttttaagatggacaaatggaaattgatagtctttaaacataagcaatagggagaatatgcacataggcagattaaaaaatgcttaatgagaaagccatagcagttatccacttctggtcttatttcctttttaatacccaggaatagctgtgtgtactgctaagaattcacttttctgcagtatcacacagttcaggttgaagacagaggaccgctttccttttgtgatatttatgctacaaagtaatgttttgcctaatgcatttccacttatgagataaattgtggatattatcaaaaacttttctggtacaataagtgaaattcctttctaattttcaggaggactcagagagagtaatgataattaccggaccaaacatgggtggaaagagctcctacataaaacaagttgcattgattaccatcatggctcagattggctcctatgttcctgcagaagaagcgacaattgggattgtggatggcattttcacaaggtaagtacgttaattcagcttgcatatattcttgaaaataagtcaagcccacattatcgcatgaattttccttttgtgtacatatttagatgctcttaaagcactcaacatttaggagcttaaataaattatttcaaggccgggcacggtggctcacacctgtgatcccagcactttgggagaccaaggcaggaggatcacttgagtctaggagtttgagagcagcctgggcaacatggcaaaaccccatcttgacaaaaaatgaaaaaattagccaggaacctgaggtgggaggatcacctgagcctggggaggttaaggcaacagtgagccgaggtcacaccattgcactccagcctgggcaacaaagtgagaccctgtctcaaagaaaaaaaaaaaaacaaaaacaaaaacagaaaaaaaacccacgttatttttattatgactgttaatactagaaaagacttaagagttaattttgtccaatagcttccaaattatttttaattattgagttattttattttatttattattattattatttgagatggagttttgctctcgtttcctaggccagagtgcaatggcactatctcagctcactgcaacctttgcctccccagttcaagctattctcctgcctcagcctcctgaatagctgggattacaggtgcctgccaccacgcccagctgatttttgtatttttagtagagacagggttttgccatgttggccaggctagtcttgactcctgaccccaagtgagccgcccgccttggcctctccaagtgctgggattataggcgtgagccaccacacccagctgagttcttattttgaagaaaatcttttgtagaaaatcaatatttaagcagataaaaacagatctgctctgtcttctggggtagaaggcttggagacttggctgttaggctctgtagagcacagtctgaaaacttgtccatcctccccattttaggtgcagacctgaaacaaactgcaaaaggcattggaccaagatcattttgttgatatccctttttactctatgaacattacatgcaactgactaagtcttaccctcaatgtgtaaacctaaattttatgccgtgttaggaatatgagtgaaatatcctggcttcactaaggagaattcgtagtttaatctgtttaacaccttctgatttatcagttcttaaagcatcgtgtatatttcttacatgtacatttctaaaaagtaaatacagtctctgtgcatagtcaagctttgtgtatagagtgtcttgagttgttgtccagctacgtatttatataatatttgactgtggaatcacatcagaatatatcacatgctaatattgatattcttgagtagacactaaaatgctttaaagcttcatttttcatctgagaatgaacaaagtaccctgaattctgtttgatgccatgtcaccaaataggtgttattctgatccccatatatgtttaaattaactcaaaataagaaatttaaagagtctttctttagttcttaagacttaattgattttctattttataagaaaaacaaaccaggtattttattttggttacagtattaaggaaagtagcagagatatttagtaaagaaaaaaaaaagagaaaaaagaaaaaaattattggtcaatataaggggatttgcctggaaggaaatcttgttactgagccgaatagcaagaatgtttgtagatacaagtaaaataaaagaagggtttatttttgtcatataaggagaaggctggaggtgggtagctacttctggtgtttcagtggctctgccatttcactggcctttccctcagagttgtaagattgctgctgcagctccaggcatcacattcctattcacatgaggtaaaaaggagaagggactgccatagctcccccacaccctttttttaaaaaatttttttaggacatagtaggtttttaggatcctcccagaaaacttacctttcactgaccagaactgtgtctcatggccatagttgcaaggaaaacagaaaataagaaggtagtttttgtccagcttttaaatagagttaagcacagtaattgggaatacaatcagtggtaatcagaaaatagtttctgtcacagggtgtggaatcagtaataatagtaacagccaacctttatgatatatttacaatattagtgtaatattcttatcaaggtacaggcactgttatgtgcaccttatatagagtactttatgtaagtacattcaatgagtacatgtctaagccttctaaaccatgctgatttcaagaaattggagtatttatccattcattttcatttattcattcatccaacatgtactaagtgaatacctaacatatggcaggcactgagaatacaaaggaaccacagtttttgatttcatgaaagctatgtagtggagaaaatcagcattaaccaaataatcacatacagaaatgtgaaactgcagctatgacaagtcaatgaaggctatatgcaagatgttaggacaggctgtgatcctgatatgatctggtcaggaaggtcaggggaaggcttcccttagcaagtaacttttgagtgcctatctgaaggatgagtgtaagaaggaaggaagtatatttcagagagagcatgtgcaaaagtcctttagcataaaaaacatagacaatgagtgaagggtggtcctccaggagagcaagattctaggtgaagcatagccatgtcattttaggagtttatcctaagagccatggtaaactattgaagaattttaaccagggtttggcatgattatgtctgcattggttacactgtaaagaatgtctggagaaaaaaccaagtagatcagaggaacccaaagagcaggctcttttggtggtcttggtgaaaggatcagtaagtagcttggattaagtttgtagtgctagtttaagtggaaaggagtcatatttgaaatatatttgggaaataaatcaccaggacttggcgatagataggggtatggcagctgagataaatggagttgtcagagatgacattgagtttgtgcatctgaatggtgaatggtgacatttactagaagaggatgttttttcatagattccgacgttatctttgtgtataataagtagaattattctgagacattcaaagggagctatcatatagtaggcagtggatataaagtttagatttcagacagagagatcaaaggtaaagatgtaaatttgttgtgagacatttttgtgtacgtgattgggtgtggatgagatcatcttgacagacagtatggtggagaagattaatgttctgagactgaaccttaaaactgccaagatttcatagttgagtaagaagttaaggttgaaaaccaacaaaggaggtgtagccagagaggcaggagagaaaaacaggacattacagtgtcatgggagcgaggggaaagagtgcttcaagaagaaaagtagtggtcaacagtgctgaaaggtcaggtgagttgaagcctgaaaagtcacctttggtcttagcaaaatagctgtcactaatgaccttagcaggagctgctttcgtggagtggtggggccacactgcagttaaaagagggctaaagagtgagttagaggtcaggaagtagagggggttagtacaggtgatactgcaaaggttggccaggaagaagacaggagagatccagtgagggacttgttttttgtttttaaatggtagacttgaacgtacttcaatgggatatccagtgggatatgttatttccaagaatttattattctaaaaataaataaattaattaattaatcacctttggaggatcctagaatgaatcctaatgatacttaaaatcaaaatatcattagtcacatggaggttgaaaactgaaaaataaagatccaagcaggtatcctatcttttcaaataggtaacggggaagtttctctttatagaaatgttccagccaataaaccaagcaggaatgacaagaattagagtatcaccctttttgcaacccctgatgtaataacagatttaagtaataatcagaaatggctgctaatgtcaccaaagcagagacaaccagacattaggtaaaagtttgtgacaacttatgatgtcttctggccaaaaaaaatcaaactgaatagtcgggcatggtggctcatgcttgtaatcccagcactttgggaggccaaggtgggtggatcacctgaggtcaggagttcaagaccagcctggccaacaatggccaacgtggtgaaacccgtctctactaaaaatataaaaaatagccaggtgtggtggcaagcacctgtaatcccagctacttcagaggctgaggcaggagaattgcttgaactggggaggtggaggttgtagtgagacaagatcacgccactgcactccagcctgggcaacagaggaagactccatctaaaaagaaaatcaaactgaaactgttcagacctctagatctagataccaatttacaagagaaaaagagaatagaggaacatgttaaacaccaccataggggtactgtcagcaaaatctagactgtgggaaactataggacaaatgactggtgtttttttttttttaacaaataaatagcaatgacaaaaaaaaaaaaaaaaaaaaggtgggggagagagggaagagaacctgcatattaaaagagagttaaagaccagtcacccagttccaacatacagatcttaattcaatcctgactcaaacacataaacctttttttttaaagcactagtgaaacatttaaaaatttttgagcactgacagggtatctaatgatactgaagaattacttaaaaaaatgtttaagtgagataaacagtgcaatgcaatggttatgatttaatagaaaaatccttactttagtgatacatgctaaaatgtttacatattaaatgatttgctacccaagatatacatcacaataatcaaggatggatagggaaatttggtaggatagagatgaaatgagattggccatgaattgatcattgtttgagcttgataatggctacattggagttgcattatgcatttttctttattgtacatctttggatttttttataagtttttttgttattgttctgggatttagccatttgagaaagagataagatccctcgtgtaggataggcattgtttcaaactgtgcgtatgaaatcagtgcattgaattgcaattagcattttggggtaatacttcctagatagtgctttgtgttccacatcatggcatatcagggtgcaaccaatgtccagttgacccaaataagctttttttttttaatgcagtagaatggagtagaagaaaaagtatcaaaatcattaatttatagcatgtggcacagaggtggagttatgcaataagaaggccattacatttctgtgtcatcagtaatgacatagaaattataatgttattaggagatgttaacattggcccaataatgagatttaaactctgttgtgctaaaaacatatgtatatataggacaagtcacccagttccccatatatgtgtgtgtgtgtatatatatgtatatatatgtgtgtatatatatgtgtatatatgtatatatgtgtatatatgtgtgtatatatgtatatatgtgtgtgtatatatatgtatatgtgtgtgtgtgtgtgtgtgtatatatatatataattttttttttttttgagacggagtttcgctcctgtcgcccaagctggagtgcaatgacacgatcccaggatcccagctcactgcaacctccgcctcctggattcaagctattttcctgcctcagcctcctgagtagctgggattacaggtgcccaccaccacacccagctaatttttgtatttttagtagagagggggtttcgccatgttggccaggctggtttcaaactcctgacctcaggtgatccgcccgccttgacctcccaaagcactgggattacaggtgtgagccactgcgcccggccaaaaacatatttttattaaaaccttagtgcactgtagttttatgctagacgttagggatacaaacctgaataagataatttacctgtctttaaggccatagggcctgtgtccctgcatattcttactgagtatgccaagaaagcccctgtctttaaggagctcaagtgcagtaagggagatggagaagcaaatctttacaattcggtaagaccatgcaatgctagagaagtgtatgtgtatacgtgtttatttgcttgctcattccttcattcatgtttttcctgtcatcttccagaaaggaatgagacagcttgcagaaaattcaaaatagcttaagtgaataaataaggatgagggcttaaaatggagccatgactgaggcttaaaacatcaatgcccaatactgctgtggataagccataaatctggttcaaaggtttccacaaagctaaatttgttcagttaaatagttcacagtgcccagaaagccaaatgaattaattagttaagaaggcaacttaaaacaaatttttattgtgtttgacagcaatcttttagtaataaaatcagctagaagaatatattgggtagtatcacacagactaggttttattgggtcccattggttacagtttaggaaacaaatgtttgattatattattcttggatcacaggctccactgagacagaaattgtgcttgttctgcacaccttttatcccctattcctagtactaagtagatgtgcagtaaatatttgtttaaaaactgacaataaaaactgtaatataaataagatgtgttgacataactctgtttcttagtccaaatttctggaatctgaaggaaacatccccttgtgattcaaacaccatctaaaatagtatattggagcttaactaagttttgccacaggactcaaaaagtcatcaaatttctatgtaagtttcggtcttataaagaaaacacttaagtttaggtatgtggcaggataaattattaatacacaggaaagagcaaaagttccagtgtcatggagattagtctgtcctgacaacactctgtgtaccagtgcacctttgtgatgctgagtaagaggagatttgcacttcacgaaggtccaggttaagcttagttgctcagtctggactctggtccctaaagtgggaagtctcaggcaaatctgagtatcagaccatgccggcaattcagctctcttcacctgcttctctctctgcaagatgggataatcatgatacttatatttcagggtgttgtcatgtagtttaaataatgcatataaaacaatctagtacctgacatatagtagttccttggtaatattagttacaattttaagtcccatctctatgacactttgaccatttcattccacaatgatctgttcacggtaaactcctaatgccctatttatttggactcagttatttcagtgtcttatttcagtatctatcttagttcataactggttatcctatgccatcatgctatttgttcactatttgagggaaagaactctactccattgtgtattccctgccccactcaggatggcagtaagtacagctactaatataaattaaagtcattcagaaatgaaattattttcacatttatattacattgttttcacttcatcctggaagttatcattagtctgaaacaaacccagagatactgatcccatatttcaaaattgaccacaactttaaagcattaattaattaataaagaattacacgtgccagtttaaaaagaaatatgcagattatagagatttaaatactgaaatatgggacattttcctgtgctctgccatttgagtagctgttagtttatcaaccttcaggtcatgtttatagaagcactctgccacagggcctgtgtccctgcatattcttactgagtatgccaagaaagcccctgattgctttttacatgggccacttatttgtcaaagttgtgcttgcagcaaacaacctggagggataagttaattctccccttaaagaggaagcttgcttcccttgttgtatgcacagcatccatggtacatcaccctcacaggacttgggggctaatgtaaaccaacatgagtaataaagtcctttgtctctgacccagtggccttgtgtcttctgccgttatctgtgaaaccagtggtattagggtaacctgttagcttttaagcagagtaaaatcctagacttcacacagtttttgataggtcaataggattctcagatctcttgctaatattaattacctgcaaaatgtgagtaaaccggctgtgtatgggaaagaataggggctttagatctagaaaactcaagattctgtacaagttctccagcatcctggccatgtgcaagttacttcatccttctagaaccctgagagaagtactgtgccatagtcaagagaatcagacatgttatacttgagcacaaatcttgcttttcccttttaacaactatgtgacctttttcaaattactacttctcagtgtctcagttcttttcctgtaaaatggagttgatactgctaaccctcatatattattgtgggaattaaataaagtacatgaaaatgccagacacattgtaggtacctagtaaattttagttttttttcttccagattctatgccattagtattttagatttaaaagtctgtcttcatatatgtgtgagtatagtgctcacttttctaaacttagcatcggtttttgcacctataaaacaaaaagttcgataataccgacttcacaaggttgatttgagaataagttttgaaaggatgtgaaatcactatgaagtgcttctcttagttgttctcattgaaagaagttgaccaaatctaatctccctgacactttccctcttggagcactgtggccataatagaattgagaatccaggaacctagaggcaccacccacacagaatgggataatggcagtgcctttccttctgttcctcaggaagtggctggcatggaaggtggtctcatggaagatgcacatcctcctccatgctgagacatgcctttatctcatgactcaggaacagccttaaggaactggcccaattgccaatcactgtgtgaaagaacaaccaccaaatttgttgtttcagcatagtaggattcattctcaatttattccatcaaacatactagttttttagctacttcgggatatattttgcagtgacttggtcctggtgggtagtgttatgtggaaagatacgcttgttacaatatgtgaaaaagagccagttacaaagcctggcattcatttcacttttgtatgagtaattgtatgtataaatatatgtggagaaaaccatctagatagaaggcttattccaaaataccatgggggatatggctttatggtcatttttcttttacttatgtaaatttttaaatttctaaaataaatgtgtgaaaaaagtaaaacctcctcaccctcacaaactaccagtattggtcaaaatgagatgttttataggaatctggtgaaatgcttacatggtcactgtctgacaactctttttttctggggcaaatatctctttcctactcagggacgtggaatttggggttttaagctttagaccatcctgggcacttcaatatatcagaccttacttgtccacaaagtttttcccagactataagtaaccctagttcttcttcctttaggagttgatggcattctgtctgggagagaatacaagattcatgtatttaattttcataataaaaacactgctcatatggcactcttaatcttcagtgcacattaaattttttttttccatggagctttaaaaaaaatactgatgcctgaaccctacctccagaaatctttttttgttttgttttgttttgttttgtttttattgatcattcttgggtgtttctcgcagagggggatttggcagggtcataggacaatagtggagggaaggtcagcagataaacaagtgaacaaaggtctctggttttcctaggcagaggaccctgcggccttccgcagtgtttgtgtccctgggtacttgagattagggagtggtaatgactcttaatgagcatgctgccttcaagcatctgtttaacaaagcacatcttgcaccgcccttaatccatttaaccctgagtggacacagcacatgtttcagagagcacagggttgggggcaaggtcatagatcaacagcatcccaaggcagaagaatctttcttagtacagagcaaaatggagtctcctatgtctacttctttctacacagacacagcaacaatctgatttctctgtcttttccccacatttcccccttttctattccacaaaaccgccatcgtcatcatggcccattctcaatgagctgttgggtacacctcccagacggggtggcggccgggcagaggggctcctcacttcccagaggggcggccgggcagaggcgcccctcacctcccggacggggtggcggctgggcggaggcgccccccacctccctcccggacggggcggctggccgggtgggggctgccccccacctccctccaggacgggggctgccccccacctccctcccagacggggcggctggccgggcgggggctgccccccacctccctcccagaaatcttaagttggactggggcatggtctggaagtcacattttaaaagtgtcccagatgatttcaaagtgaagccaagatgtggaagcacttcctcaagccctcgctggagaaatcatgtgttgaattataaaaataataggtgcttattatgaaatgtaacaggtgtactagggtatgaagtgaaacaaaaacaccccattctccccaggtctaccatgtttctttaggtaacatttcacaagtctacaagtatacatcttttcttttctaaaatggtatcatactaagcattactattgtataacttgcttttgtttcctaatatgtgggagacatatttctctatcagtttatacagattagtcgtgctctttttaatgactgcagtgtatctggagtacagatactccttgatttctttaacctctgagagctccgtctgggacagactgccctttagtatatgggacatgttccctatccattccactgtgctcccacatcttcctgttgttaccactggaaaggaatctacatggactacattaaattttatccctaggatataattatatcccattaaattatatccctaggatatagtttaatattacgcccttgtagctttcattgattttttatgaaataattcagacgtataataatcctccatgcaccttctaccctactaaagaaataaaacactacaatacaatcgaacctctaatcctccctaatcccattgccctctaccctatccatagtaactaactggttgtccttgactttggtatccatcccatgcatttctctacatttttactcactgatgttttttgaaacaatgcatggaagtatttggtatgcttttaaactttacacacagtgtatcacactatattcttctgtaagtggctttttcccccctcagtgttatatatttataaaattcatatgggtacatatactttgagttcattaatttttccctaattatgatagtttattttatgaatatattactattccctcatttttcttgatatgatgccaattttttgcaaatataaacagtcatatttgtgacttgtctcatactcaactcctagtgcacacaagggagtttttctcaatctaggagtggagttgttggattgtaaggaacatgtgtctttcatgatctccaaggaggctgtaccagcttagaatcccaccaccagtgtttaaaagtttgttctcatgcttaaaatagattagaataagaaatgttcatttgatgatatttctatatattctccaaaattgctcataagaacattttcatttttattacttaatgtccttcacatgaagtgccatctggtaaattatttttttgttaatgctagggacattttttctctccatgtgcatactgtgcctgtttacaaaaagatttgaagcaatttattggccttttctgacaaactgccaggcttcctgctatcagccagtggctgcttcctctttaattcctttttgtcttggctgccaagacagcaagagctaaactcaaggctcaggtgtggaaacaaatttggcttagttttccccttcgcttcttttatgggagtatttctctagtgtcattcttagaacagctgcatcagaatcttggcggtgctagttaaaaatgctacttactaagccctttcacacatctttttaattggaatctccaaggtggtacacaagaattagcattttaaaagctcatgctaagcttaaatgtaagaatctactgtatggcttgtaatcttagtttcatgtaattgtttcattagaatatgttattgtaaatcacttcaaatgctttttgtactcaatggaaaaaatattaaaatctagcagaatgagatatttgcataagatttagctccaagctgtatctgtaaatagattctattatcaattggccatttagaacactaggtttaaatctgtggattccataaatattcattgagtgcccactatgtgctatacagtgtgcaagaagaagaagtaaatggatgaaacgctataaacagacaggaggttaggaatttttttttttttttttgagatggagttttactcttgttgcccaggctggagtgcagtggcataatcttggctcactgcaacctctacctcctgggttcaagcgattctcctgcctcagcctcccaagtagttgggattacaggcatgtgccaccacgcccagctaatttttgtatttttagtagagacggagtttcaccacattgggcaagctggtctcgaactcctaacctcaggtaatccacctgcctcggcctccagaagtgctaggattacaggtgtgagccaccgcgcccggcctccagaatcttttatctgaatactataacctcacatgaatcttttcctgaataagaagcagatttttttaaaaagtagagttttggcaaacacatacatttgtttctaatggatatatctgtgcattatgatatgtgtactcatcgatgaaatatttctagacccatatttccaaggatcattaacatccttgaatgcatcactgagataagatctgtttattatcttgatgaatataaacttaaatctcatctagccttttagactcagtaattaagttttagaaaagcaatgaattattaagtctcattagaaaacagtttgaaaaaagcaaaacaattggcctcttctctcagcataatttatttctattaaacgttggtgattaagcgttgatgaaaagagatatttactcgatgtggcccatagctaacaattttcatgccatgctacttacacaaactccctcttctgacacccagcttcagggaattctgtgtactcagagtggcacgagtgtgtttttcttgaaagagaattggaagataatagacattcaagtacttagtaacttatttgtttgcccaacttagtgtaattcagaaaatattgagcactgactgtggagtatttgtactctatacaaaatatattctttatggacagaaagaaaacatcttgaatcagtccacaccttctaattagttgtaaataccagtactaaaatccacatgataagtgagcactaaatgagtaagttgttatgattttattggcattaaaaatgtcatcttatcaatatctctgtgctttctttaactgtgtctagcaaacactagttatcttatttcatctttttcatgggaaattattttatgaatttaaggcttgttcctttaattagcttcctcaaagtcacctgaaggtttggtttgatttggttttaaatgcaaatcccaggcaaatcttctgattgaagatcccctggagatagatactgttgtagtaggtatgatgaaggaggcctttagacactatttttttaaaaaagactttaatttttcagagcagttttaggcttacaccaaaactgagaggaaggtatagagagtgtccatctacacttaccactgcccctgcacagcctcccccattttcagcatcccccaccagagtactccctttcttacaattgatgaacctacattggcacatcattaccacccaaagtccatagtttacatgagggctcattgggtaattgataaacaaagtaaatttattacagttctgtagactgggaagtccgaggtcaaggggctacatctggtatgggccttcttactgcctcataaaatggcagaaggcatcacatggcaagggggcttactagagaaaaccaaactggcttttacaacagacccactctagtgaaagtaacccactcctatgataacccattgattcattaccccttaatccattaatccccaaatggattaatccattcataagggcagagccctgatgacccagtcacctcttaaaggccccacttaatactgttacattgggaattcaatttcaatgtgagttttagaggggacaaacattcaaaccacagcattctgcccctggcccccacaaattctatgtccttctcatatacaaatacattcattccatgtttatagccccaaagtctagagtctcatcgaatcagatgtgagtaatgctcaaaggacaattcatcttgaggtaaatttcttacagctgtgagcctgtgaaatgaacgtgttacctacttccaaaataaatggtgggacaggtgtaagacattctcatttcataagggagagataggcaagaagaaaggggtaacaggtcccaaataagtccaacacccaaaggaaaaactaagccttgaggctccagagtaatcttccttggttccatgtcttgcttcctagatacaccagtgtgaggattggatcccagggcctcaggcagccccaccacctaggctttcctgggctctcccaggcttcagttctcacaagtaacagtcaagtgcctgcagctttcccaggctggagctgaatgctggcagttctacagttctgagatctcagcgaggttctgttctctctgctccactagacattaccccacttggggttgtctgtcctggctctggctctgaccccacatttttgcttggcattaatccacgaatggattaattcatttatgagggcagagccctcatcacccaatcacctcttaaatgccccacctcttagtactgttacattggagattaagtttcaacttgaatttcagaagggtcaaaatttgaaccaaagtactgtttatttccttttcctgtcttattgcattaactagtacttccactgcagtgttgaaaaggagtggtaagaggtgacagcttcctattttggctgatcctagttggaaaagcttcaagtttctcaccattaagtatgatgttagctataggtttttttgtgaatattccttatcaagttgaggaagttctcctctattcttaatttactgagagtttttatcatgaatgggtgtcggattttatcaaatgctttctatgcgtctgttgatatgatcatgtgatttttcttctttagccagttgatgtgatggattatgttaactggtgatcaaatgttcacccagtcttgcacacttaggatgagtcctacttagttatggtctgtttttctttttatacattgttggattcattttgctaatattttattgaggatttttgcatctatgttcatgagagatattggcctgtagttttcttataatgcctttgtccggttttggtattaaggtaatgctggccttatagaatgtgtcaggaagtattccctctgcttctattgtctgaaacagattatagagaattggtctaatttcttccttaaatgtttgatagaattcaccagtgaagccatttgtgcctggtgttttctattttagaaggttaatacttattgattcaatttctttaatagatacaggcctattcagattgtccctgtctttttgtgggagttttgacagattgtatctttcaaggaatcagtctgttttatctaggatatgaaatttatggccataacactttacagtattcctttattatctttttaatgcccatgagatctgtggtgatgtctcctcttctatttttaatattagtaatttgtatcctctctctttttttcttagccaagctagaaattattaattttcttgatcttttcaaagaattagcttttggtgttgttgatttttctctattgattttctatttccaatttcactgatttctgctgtaatctcatcatttattgtcttctgcctacttcagatttaatttactttcctgtttctggtttgcccttgaactcttatttttaagaatctctacaagtgactctgatgcacaaatttaggagccattgtttgcattttaatttctaacattttataggaagaaaaacaggatcagagagagattttgttttgcatgaggttataatgtgtgcagtttataaggatgcagcctctggttatattgggttcccctgtattcatcttattgatttatctgattaattttatccatgatgacagattaatcttcctttgacaaccttaattatgtgtagttttcctagctatagttaacattgagtgaaatcatttgctctgttaattatttttctttgcagttcttgggactttcccacaaagtggactactagctatgttagaggatgagttgcccagtcagcacagtgtggattttctttgaaggaaaatacctgtgtccttcgtaagtgtcctacacatgctttatagacagggccagggaacactgtcatgtgagcctgtagaaatttagaatttttctggattgttctcttgattctcatcagtgtttccacggaaattgaaagattgctacagtgggttttgcttgattatatgtgcagtttagtattataacttttataaataaactttaaatactgtagtgtgatcttattgcaatcattagaaggaaggattatatgagagaaacttttttttctattataatacacatgcttctcaagttaaaatgggactatgccctgataaacccatcataagtcagaaacatcataaatcaaaaatgcacttaatactccagtaagctcgttataaaattttaaaataataagtcagggattgtctgtaattttacttatgctaataaatgtttttcatattgctagaagaaggctagttatttctgccttgtcttaacagaatgatacgatataattcttaaatgtatcatttgtgatttttaaaaataacatttgtttttctaattacacaagtaatgcatgttcattatgcaaaattttaaactcaaaattttttaatcacttgtaattccaccacctggagatcattgttgtttaggtagatggctttccaggcttttttaaagtgcacatatgtagtggtaaatcatttgtaatttcattccatttctgagttattgtttatgtttaattaaatacaagacagatttactaattcacgctttttatgccttttaaataccatatggtgcctacatatcttttagtaattggtattctcttacagtctttcctctacttggactttagttttttggggtgtttttcttccttataccatccttcttaaaagttagagtactttgttagttaggagattagctatcttttgtaaaatgtatgtaatatccaaaaaaaaaaaaaacaagctttgacttagacatccattttggacagagttcaaagtttttagcaacctgaagtgaatgggaacatcttcagtttcagaaagcacacaaaataaactaactcttaaaacctctccaggttgggcgtggtggctgactcctgtaatcccagcactttgggaggccgaggcgggtggatcacgaggtcaggagatcgagaccatcctggctaacacggtgaaaccctgtctctactaaaaatacaaaaaaattagccgggtgtggtggcggggcgcctatagtcccagctactcgggaggctgaggcaggagaatggcgtgaacccgggaggcggagcttgcagtgagctgagatcgcgccactgcactccagcctgggcgacaaggcgagactccttctcaaaaaacaaaaaaacaaaaaaacaaaaaaaactctcccatacaaagcacttagaggataaatctatattccacttatatgagatgcctagaataagcacattcatagagacagaaaatatggggaaaggggagagttttccaggatggggaaaggggagagtaaagagttactcttaatggatacagagtttctctttctgtttctgatgaaaaagttctgcaaatggaggcctggcatggtggctcacgccataatcccagcactttaggaggctgaggtgggcagataacctgaggtcaggagttaaagaccaggctggccaacatggtgaaactctgtctctagtaaaaatacaaaacttatacagggtggtggtgcaagcctgcaatcctagctactcaggaggctgtggcaggagaatctcttgaacctgggaggcagaggttgtggtaagctgagattgtcccactgcactccagcctcggtgacagagtaagactccattaaaaaaaaaaaaaaattctgtaaatggaaagtagtgatggctacacaacattgtggatgttaataccactgagctgtgtacctaagaaatgctaaaatggtaaattttattatttttatatatatatatcataatttttaaaagcacttgaagtatgtccaataatactgttgtaataggaataatcattgcctctacttaacaattttaatatttaagctctagttatcattcaatatgaaaagtcctcttttcctaattgcagtatttctcccttatactagcattttccttgcaaaaggcccagagattgtgatttgaagggacagaagcccactccatttgcctgagagacatctagaatattatctcaaaatagtaagatctcataaaaacaaactgtttttcaaatttccatgaaagtgttttttattttagaaactgacccaaaaaagtactaatttcttttttccacaatgctttattaagctttgttgacctatataagggttataggcgaggaggggagtagggggattagaaagattagtcagctgccactcctaaaaatatcagagtgattttttttttccttaatcacataactgtaaccttctgtctactcagggcaaactaactttaagatgaaacctaaagaatggatttttcattttttactacatttgactgtaaatacagacagcttgataataataacatatgctgtggaattccctaaatctctaacatattttaacatcattgtctagtatagtatgtcttataaatgattgttgatttaataaaaactataaactttatttatttttttgtttttttgttttgagatggagtctcgctctgtcgccaggctggagtgcagtggcaccatctcggctcactgcaacctccacctcccgggttcaagtgagtctcctgcctcagcctcctgagtagctgggactacaggagcgtgccaccacacccagctaatttttgtatttttagtagagatggggtttcaccatgttggccaggatggtctcgatcacttgacctcatgatccgcccacgtcagcctcccaaagtgctgggattacaggcgtgagccacctcgcacagccaaactttcttgttaatgtatatcttgtcttgcttctaaaactgattttaggcgtgagccactgcgcccagccatcttaggcactttactgagatatttacaacatagcagaataataagagaagagaatggtatcaaagactctggatcagagagaaaataagaattgaattatgatataaagccaggtataagatgttattcagttgttttctagtaatcaagctagaataaataaactatacatttcttaaaggaaattaacaggaaatacgtttatcaataaacagttcccacaattataaatgcatacttccccagtagccttgatgactggttcatgagccagtatttcttcagtgtgtattcagcattgctacttccattggtactacatccgtaccatcaggtgctatggaaaaatagaattgtaatagaaaatgtgttggctcctaatgcagtggccttcaaactaccctccagggtgtgagtcccacagagccgcctcagaataacaggcctaatagtcctgggttcttaaccagagcaaacatcattcattgtatctaatctgcagagtgaattttcttataaaatattaaatattttatattaaaatatattttaaatatttaaaaagttctacaaatggaaagcagtgatggctacacaaccttgtggatgttaataccactgaactgtgtacctaagaaatgctaaaatggtaaattttatgttatatatatttatcataatttttaaaagcacttgaagtaagtcaaagaatcctcctgtaatagaaataatcattgcctctacttaacaattttaatatttaaactctagttattacattttaaatataattaaaatatatttttagtttaaatacttaataaaaataaatacttaaaatatatataaatataaaataataatacttaaaaataataaagtaaaaatattatttgaacaaaggatttaacagctaaaaagatattttgaaacctctgacctagtactagagtcaagaccattgcctaataaaagtatgtccaagatctcctgaacactggcctgccctccttaagaaagaaaccctataataccatgaggcatgtaggggtgactcaaaaaactccaggccagaaaccagaacacctaataagtatttgtctcttgtctgccacagattagccctgtcaccttgaggaagtggcttgacctctgaaatgtcttatctcatctataaaataggagtataaaatgattactaagaacttgtccagcaccaagactttttcaaaattctttctcttgcctcaaagatggcaaagaatgtgccatcagacaagctcttcccttctgtcaaaagagaagaaccattggagaaagaaatgaccaaattctatgtagagagcttgagcaagaagaaaaaatgtaggggaagggtaaatagctctgtctagagcaattggcttttgttgtttacagcttgtctatgtcagaccatcccgtaggaaaagtttggtaagaacaaagacctttgataaaagatgactgagagactgtctggggtttgatgcaaagatcatcagaggcatctacaaatgagtagtcaccagtgacaaaatctcaaagcgaggcaggctggagaatgggcgatctgttagtcttgccagagaggaaggtattagcaaaggcagattgaataagcggaaggtaaaaaaataaaaagcagcaatagcattttttttttacatatacttcattagcacaggtttggctttaccaatataggaaaggcatttttacactaattaggtcattgtgaaaaagaaaaattggagttattttttaaatgcagtgtttttaactaagaagaaaatatgagaccgggtatggtggctcatgcctgtaatcctagcactttgggagcctgaggtgggtggatgacttgaggtcaggagttcgagaccagcctagccaacagggtgaaaccctgtctctactaaaaatacaaaaactagctgggcatggtggcacattcctatagtcccagctactcgggaggctgaggcacgagaattacttgaaccctggaggtagaggttacagtgagctgagattgcaccaccgtactccagcctgggcaacagagagactgtctcaaaaaaaaaagaaagaaaatattaatactgtggaggttatgtgacagtctttaataacaacaaccagttatattactataataagctttccatgaaaacaccaaaaagtactttttgatatcttattaaaaattaagattctgtcatatttcttagaattatatacattataattttatgttttttagaataaactcagcaatactgtacaaggatatcgtaatctatatggaagcacaaaggaacatataaatttaaatccttttgctccatgatcagtcacttcttttcattttaaactttaattttggacattcacaaaattgttaactcttgagtgatgtggattgagtaagttgtattacaattgtaaaaacaaatgattcatttcaacttgtattgaacatcttatgtgcaagacactctgcttaacacttgaggggactacagagataaatcagtgaggtcagttctatgggaggggaatcagggacagctacacagaagcagcttaaggatgataaggcttccagtccacagaaagagaggggtgaagatgattccagtataatggaaccatgagaacacacagaggaataaaggtgtgtcacatcagctctttgaatatgccacaaaaaaaaaaaaaaaaaaaaaaagctctgaattagttttccctcagtatctgctggggactggtttcaggaccccccagtatgaaaatctgcagatgatcacatccctgatataaagtgggatatttgcatataacctgtgcacatcctcctcgatactttaaatcatctccaggttacttagaatacctagtgtaatgtaaatgctatgtaaagagttcctatactgtattatttttaacatttatattattttgtattgttttttatttttattgaatattttcgatccacagttgattgaatctgcggttgcagatacggagagctgattgtataccctctaaaaggatgaattttatgctatgtcacttatatcttaataaagctattatttttcaaaagtacatgccgtgtgttagagatggcaaggataaattgttgtcatggtgacatgggatcctgtgttgtgcagaaggagaggagactggagagaggtgtaggatcagaccacacagagggtcttgaaaaccatgctaggaattttgaattttattttccaggcattagtaaaacattgtaagtttttaagcataggaatcaaaatgactccattgattttaaaatacggagctaaaagataaattagctgttagtaaaagtgaaggtggagaggaaaaactaggctattggaacagcttcgaccaaagagtgtaaattagtgaaactagtttgcaagaatactagggacaggggtcaggcacggtggctcacgcctattatctcagcactttgggaggctgaggcaggaggatcacttgagctcacaagttcgagaccagcctaggcaatgtggcaaaaccccatctctaccaaaaatacaaaaattagccaggcatggtggtgcacgcctgtggtcccagctactcaggaggctgaggtgggagttcgcttgaacctgggaggttgaggctgcagtgagccaagatcgtaccattgtactccagcctgcgtaacagagccagaccttgtctaaaaaaataaaataaaaatgctggggactggatattgcatcttaaaggggcaaggaaaatgaaagaaaatgctgaattctcattttcatatttatagaacaaagatactgtattatttttctgaactgtgtaaccaactatcacaaatttagcagcttgagcaacacacatttattatatcaacatttctgtggttcatgaccccagacacagcttagctagggttgtgtgaggctgtggttaaggtattggccagggtgggattctcaccttgagtcaggactagagatgcatccactttcagaattacccaggttgctggcagaattcatttccttgaggttgtgagtctgaggtcctcagcttcttgccagctgtaggctggggactgctctcagctcctagaggatgcttgcagatcacatggccctctcaacatgacagtgaacttcttcaaagccagctggggagaaagtctctagcactagttgactggcaaaacatacaacatcatataatcgtgaaattaatatctcatcacctttgccatagtctgatggttcaaagcaagttacaggtcccactcacaataagaggaggaaattatccaagggggtgaacaccagaaagtggagatggttggggtcactatagagcatgtccaccacaggtacttttcagcctcttaaagtacagtagagtgtcctctaaagccgagtgagcagagtgtagactctggcgtcagaccgagccaggtttgaatcctgactccatgactgactatccttttgagcactaaacctcagtctcctcatttgtacatagggataaagatctacgtctcatgatgtggtgtcaggacaaaatgagataatgccggtaaaacacttcagtgagtgcccaagacaggaaaattgctcacatatgttatcacatttgagtctcagctaccatgagaagtaattgaaaagttttccattaaatgatttacctatattaaatcagtttttgctcttgagtaaacttaatctaatggactttttgctatatcattgtgagcatggattaatacattcatgaaaaatcactagacttgagtagaggattttttttttaatcaacctcttctttttacagacaaggaagctacaaccacatagaaaagttatccgacttgcctaagatctcacagtacttagtggctaagccaggactagagtgatggcctatttatgcaagttactgctgtttctaccatgtttagctgtgtgacataaatttttaattacgacatttatacattttttcactcaatcttgtagactagaagctcctttttcaatgagacagctaattttttaatgccaagaaatagatacatagaaaagttcaaggccttagccctaaaataagaatttgcaaacttctagtgacagtactcaatctctctgaatgtctctattgtttaagacgtgatctgatgttttaactttaaattaaactaaattggctgggtgcggtggctcaaacttgtaatcccaacactttgagaggctgaggcaggcggatcacttgaggcgaggagtttgagaccagcatggccaacataccgaaaccccatctctactaaaaatacaaaatattagccaggtgtggtggcgtgcacctatagtcccagctgcttgggaggctgaggcgtgagaatcacttgaaccctggaggtgaaggttacagtgagctgaaattgtgccactgcaatccaacctggacaacagagtgagactctgtctcaataaaataaaataaatttgctacttatatgtgtatgtgtcttcacactgtatatctgggcacgctctatattttttgaaccgattcttaagggtatcccaatgatagtaatgaaaataagcagcatgaaattttatagccatcctagaacaatatttcctgtgtattttaatccactggaattgggaaagaaggattgattatgttgttttcatttaatgtccatttatcaatctccatctttgtgtcagatgtttgctaggtgcttgggggatgagaaagggtcaccacatgaccataatcctcctacccagagataactactctaaacatgttgatagccttctatatatattttttgcacatgtagtttttaatataaaaagtgacacaataaaatactttcaaaaattataattacagaagcagtggctgtcatggtaggaggaaactaaagcaaatcagagggcacaaaactgaaaactaggaggattcccatttcctcccaaccccctgctaccctccccagccctactcactagaggcaaccactgagtggtccctgattttcttctggtagttaacattatattcatataaaatattttaactctggttttagatttattagctttagacagtatctgttaaccttttgctataaaatatgaagaaattttttatcaattcaagcttgagccgttcttcttctcagcttccagtttctaaaactgtttttaccttgaaaaggtctctgacatttattattactggtgtattatctcttgtgctttttcataggctagtttaaaaatggaatgcattattgtgatcacatgttacatgtgtattctctttagagctaaatatatatgtatatcattctaaggtactaaactttgttgtttgacaaacctgacaaaacaagcaatggggaaaggaaaggggaatcttctaggcatcccagtctaaaactcttcatttctatccagcttttttcacttcttccatttcgactgctactcttccttgtatctcatgttattatcttccttgaatattcttttttttttctttgctctgttgcccaggctggagggcagtggcataatctcagctcactgcaaactccgcctcccaggttcaagcaattctcgtgcctcaacctcccgagtagctgggattataggcacttgccaccacacccggctaatttttgggtttttgttgttgttgtttttattatactttaagttctagggtacatgtgcacaacgtacaggtttgttacataggtatacatatgccatgttggtttgctgcacccatcaactcgtcatttacgttaggtatttcacctaatactatccctcccccagccccctacccctaacaggccccggtgtgtgatgttccccgccctgtgccaatgtgttctcattgttcaacacccacctatgagtgagaacatgcagtatttggctgcatagtattccatggtgtatgtgtgccacatttttttttaaattttaagaaatgctctttttttttaatatactttaagttctagggtacatgtgcacaacgtgcaggtttgttacatatgtatacatgtgccatgttggtgtgctgcacccattatcttgtcatttacattaggtatatatcctaatgctatccctccccactccccccaccccacgacagaccccggtgtgtgatgttccccttcctgtgtccaagtgttctcattgttcagttcccacctatgagtgagaacatgcagtgtttgattttctgtccttgcaatagtttgtgagaatgatggtttccagcttcatccatgttcctacaaagtacatgaactcatccttttttatggctgcatagtattccatggtgtatatgtgccatattttcttaatccagtctatcattgatggacatttgggttggttccaagcctttgctattgtgaatagtgccacaatgaacgtacgtgtgcatgtgtctttatagcagcatgatttataatcctttgggtatatacccagtaatgggatggctgggtcaaatggtatctctagttctagatccttgaggaatcgccacactgtcttccacaatggttgaactagtttacactcccaccaacagtgtaaaagcgtttctgtttcttcacatcctctccagcatctgttgtttcctgtcttcttaatgatcattgttctaactggaatgagatggtatgtcattgtggttttgatttgcatttctctggtgaccagtgatgatgagcattttttcatatgtctgttggctgcatgaatgttttcttttgagaagtgtctgttcatatcctttgcccactttttgatggggttgtttgtttttttcttgtaaatttgtttaagttctttgtagattctggatattagccctttgtcagatgggtagattgcaaaatttttctcccattctgtaggttgcctgttcactctgatgacagtttcttttgctatgcagaaactttttagtttaattagatcccatttgtcaattttggcttttgttgccattgcttttggtgttttagtcatgaagtccttgcccatgcctatgtcctgaatggtattgcctaggttttcttctagggtttttatggttttaggtcttacatgtaagtatttaatccatcttgagttaatttttgtataaggtgtaaggaagggatccagtttcagctttctacatatggctagccagttttcccagcaccatttattaagtagggaatcctttccccattgcttgttttgtcaggtttgtcaaagatcagatggttgtagatgtgtgatgttatttctgaggcctctgttctattccattggtctatatatctgttttggtaccagtaccatgctgttttggttactgtagccttgtaataaagtttgaagtcaggtagcatgatgcctccagctttgttctttttgcttaggattgtcttggcaatgcaggctcttttttggttccatatgaagtttaaagtacttttttccaattctgtgaagaaaatcagtggtagcttgatgtgggagatagcactgaatctataaattaccttgggcagtatggccattttcacaatattgattcttcctatccatgagcatggaatgttcttccatttgtttgtgtcctcttttatttcgttgagcagcggtttgtagttctccttgaagaggtctttcacatcccttgtaagttgtattcctaggtattttattctctttgtagtaattgtgaatgggagtacactcatgatttggctatttgtctattattggtgtataggaatgcttgtgatttttgcacattgattttgtatcctgagactttgctgaagttgcttatcagcttaaggagattttgggctgagacgatggggttttctaaatatgcaatcatgtcatctgcaaacagggacaatttgacttcctcttttcctaactgaataccctttatttctttctcttgcctgattgccctagccagaacttcccatactatgttgagtaggaggggtgagagagagcatccttgtcatgtgccggttttcaaaaggaatgcttccagtttttcccattcagtatgatattggctgtgggtttgtcataaatagctcttattattttgagatacattccatcaatatctagtttattgagagtttttagcttgaggggctattgaattttgttgaaggccttttctacatctattgagataatcatgtggtttttgtcattggttctgtttatgtttcggattacacttactgatttgtgtatgttgaagcagccttgcatcccatagatgaagctgacttgatcgtggtggataagctttttgatgtgctgctggatttggtttgccagtattttattgaggattttcgcattgatgttcatcagggatattggtctaaaattctctttttttgttgtgtctctgccaggttttggtatcaggatgaggctggcctcataaaatgagttagggaggattccctctttctctgttgattggaatagtttcagaaggaatggtaccagctcctctttgtacctctggtagaattcggctgtgaatccgtctcgtcctggactttttttggttggtgggctattaattattgcctcaatttcagaacctgttactggtttattcagagtttcaacttcttcctggtttagtcttggcatggagtatatgtcctggaatttatccatttcttctagattttctagtgtatttgcatagaggtgtttataatattctctgatggtagtttgtatttctgtgggatcggtggtaatgtcccctttatcattttttattgcgtctatctgattcttctctcttttgttcgttattagtcttgctagcagtctatcaattttgttgatcttttcaaaaaactagctcctggattcattgactttttgaaggattttttctatctccttcagttctgctctgatcttagttatttcttgccttctgcttgcttttgaatttgtttgctcttgcttctctagttcttttaattgtgatgttaaggtgtcgattttagatctttcctgctttctcttgtgggcatttagtgctataaatttccctctacacactgctttaaatgtgtcccagagattctggtatgttgtgtctttgttctcataggtttcaaagaacacttttatttctgccttcatttcattatgtacccagtagtcattcaggagcaggttgttcagtttccatgtagttgtgcagttttgagtgagtttcttaatcctgagttctaattcgattgtagtatggtctgagagacagtttgttgtgatttctgttcttttatatttgctgtggagtgttttacttccagttatgtggtcaattttagaataattgtgatgtggtgctgagaagaatgtattttctgttgatttggggtgtggagttccgtagatgtcttttaggtccgtttggtccagagctgagttcaggtcctggatatccttgttaaccttctgtctcattgatctgtctaatattgatagtgggatgttaaaatctcccattattattgtgtgggagtcttagtctctttgtaggtgtctaaggacttgctttatgaatctggatgctcctgtattgggtgcatatatatttaggatagttaagtcttcctgttgaattgatccctttaccactgtgtaatgcccttctttgtctcttttgatctttgttgctgtaaagtctgttttatcagagactaggattgcaacccctgctttttttttgctttccatttgtttggtagatctgcctccttccctttattttgagcctatgtgtgtttttgcacgtgagatgggtctcctgaatacagcacactgatgggtgttgactctttctccaatttgccagtctgtgtcttttaattgtggcatttagcccatttacatttaaggttaatattgttatgtgtgaatttgatcctgtcattttgctgttagctggttattttgcctgttaactgatgcagtttcttcatagcgtcaatggtctttacaatttggcatgtttttgcagtggctggtactgattgttcctttccatgtttagtgcttcctttaggagctcttgtaaggcagacctggtggtgacaaaatctctcagcatttggttgtctgtgaaggattttacttctcccccacatatgaagcttagtttggctggatatgagattctgggttgaaaattcttttctttaagagtgttgaatattggcccccactctcttctggcttgtgtggtttctgccaagagatccactgttagtctgatgggcttccctttgtgggtaaccggacctttctctctgactgcccttaacattttttctttcatttcaaccttggtgaatctgacaattatgtgtcttggagttgctcttctcgaggagtatctttgtggtgttctctgtatttcctgaatttgaatgttggcctgccttgctaggttagggaacttctcctagataatatcctgaagagtgttttctaacttagttccattctccccgtcactttccagtacaccaatcaaatgtatatttggtcttttcacatagtcccatatttcatggaggctttgttgatttcttttcactcttttttctctaatcttgtcttctcactttatttcattaatttgatcttcggtcgctgatatcctttcttccacttggtcaaatcggctattgaagattgtgcatgcatcatgaagttctcatgccgtggttttcagctccatcaggtcatttaaggtcttctcgacactgtttattctagttagccattcatctaaccttttttcaaggttttcagcttccatgtgatgggttagaacatgctccttttgcttggagaagtttgttattaccgaccttctgaagcctacttctgtcaactcatcaaactcattctctgcccagttttgttccattgctgctgaggagctgcaatcctttggaggagaagaggcgctctggttttcggaagtttctgcttttctgctgtggtttctccctgtctttgtggttttatctacctttgttctttgatgttggtgacctacaggtggcattttggtgtggatgtcctttttgttgatgttgatgctatttctttctgtttgttaattttccttctaacaggccccttaactgcaggtctgttggggtttgctggaggtccactccagaccctctttgcctgggcatcaccagcagaggctgcagaacagtaaatattgctgcctgatccttcatctggaagtttcatcccagaggggcacccgcctgtttgaggtgtctgtcggtccctactgggaggtgtctcccagtcaggctacacggggttttgggacccgcttgaggaggtagtctgtcccttctcggaggtcgaatgccatgctgagagaaccgctgctgtcttcatagttgtcagacagggacgtttaagtctgcagatgctgtctgctgcctttcattctgctatgccctgcccccagaggtggaatctagagaggcagtaggccttgctgaactgtggtgggctctgcccagtttgagcttccaggccactttgtttacactgtgagctactcaagcctcagcaatggcagatgcccctccccctgtcaagccacaacgtcgcaggttgatctcagactgctgcgctagcagtgagcaaggctccgtgggcgtgagacctggtgagccaggcatgggagggtatctcctggtctgccggttgcaaagaccatgggaaaagtgcagtatttggtcaggagtgtactgtttcttcaggtacagtctctcatggcttccctcggctaggaaaaggaaatcccccgtccccttgcacttcccaggtgaggcaacgccctgccctgtttcagctcaccgtccataggctgcacccactgtccaaccagtcccaatgagataaagcaggtacctcagttggaaatgcagaaatcacatatcttctgcatccatctcggtgggagctacagactggagctgttcctatttagccatcttggaagcgacccttaatttttggatttttttctgagacagattctcgctctcttgcccagtctggagtgcagtggtgcaacctcagctcactgtaacctctgcctcccgggctcaagcgattttcctgccttagcctcctgagtagctgggattacaggcatgcaccactacccttgcataatttctgtatttttagtagatatgtggttttgccatgttggccaggctggtctcaaactcctgacctcaagtgatctgcctgcctcagcctcccagagtgctgagattataggccactgcacctggctgaatattttttttttttttgagcctgtctctgagtacttttttcatgtagggctcttggtggcaaatttttttagttttagaaagcctcaaatagctttatcttcatatttgctttgaaagtttagatgaatataaatatccagattttaaatttaaagaaattgctcccgttatcttccagtattacattcaatgtagataaagtcagtaagagtctgattctcatcccttgcttaatgatgaattttttctttctctgaggcatttagaattttttaatccttattataaaattttcagcagaatgtttagatgtaaatcttttcttactaatcttactcagcatttcatgaaaccttcccatatgaaggtgcatgtcttatttcagcgtaggggcattttcttaagttattttatgtcattacctttgttgtttgtatcttttgcacttcctatttgagcagctttcaactgttaggacatggtctccgtgttttaaatctatttgtttgtactttacatttcttggtctttctcattgctgttctcagagatttctttgaatttatcttccaggtttaaaaacttggtctagggcagggcacagtggctcacgcttgtaatccaagtgctttgggaggctgaggctggtggatcacttgagcccaggtgttgtgaccagcctgggcaacatggtggaaccccatctctactaaagatacaaaaaataaaaaattagccaggcatgcctgtagtcccagcttcccagcaggctgaggtgggaggatcatctgagcacaggaaggttgaggctgcagtgagctgtgttcatgccactgtactgcagcctgggcgacagagttagaacctttctcaaataaacaataataaaataaaagcttggtcctatacagcatcgaattttaatttcacccatacagtaaatttttcagtgatcatatttttaattttcaagatttcttgttctccagttgtttatttcttcatagacttttcttgttttaagtctgtcatattcttaatcttcctgaggataccaaatcgagattttgcttgttttaattctttccagttctattagtccattttcacactgctgataaagacatacccgagactgggcaatttacaaaagaaagaagtttattggacttacagttccacatggctgggaaggcctcacaatcatggcagaaggcaagggagagcaagtcacatcttatgtggatggcagcaggtaaagatattgtgcagggaaatgcgcgtttttaaaactatcagatctcatgagacccattcactgtcatgagaacagcacaggaaagacatgcccccataatccagtcatttcccactgggtccctcccacaacacgtgggaattatgggagctagaagatgagatttgtgtggggacacagagtcaaaccatgttattccacccctggcccctcccaaatctcgtatcttcacattcagaaccaatcatgccttcccaacagtcccctggggtgttaatttatttcagcattaacttaaaagtccacagtccaaagtctcatccaggacaaggcaagtcccttctgcctatgagcctgtaaaatcaaaagctagttagttacttcctaaatacaatgggggtacaggcattgggcaaatacagccattccaaatgggagaaattggccaaaacaaaggggctacaggccctatgcaagtctgaaattcagcggggaagtcaaatcttaaagctccaaaatggtatcttttgactccatgcctcacatccaggtcacactgatgcaagaggtgggttcccatggtcttgggcacctcctcccctgtgctttgcagggtacagcctccctcccagcttctttcacaggctgacattgagtgtctgtggcatttccaggcatatggtgcaagctctaggtggatctaccattctggggtctggaggactgtggccttcttctcacagttccactagatggtgccccagtagggactctgtgtgggggctgtgaccccacatttcccttctgtactgccctagcagaggttctccatgagagctctgccctgtagcaaatttctgcctggacatccagttatttccatacatctctgcaatctaagcggaggttcccaaacctcagttcttgacttttgtgtacctgcaggctcaataccacatggaagctgccaaggcttggggcttgcatcctctgaagccacaacctgagctgtaccttggccccttttagtcatggctagagctgctgggacacagggcaccaagtccctatgctacacacagcgggggtctacaggcctggcccatgaaaccactttttcctccttggcctcccggggtgtgttgggaggggctgccatgaagacctctgacatgcctggagacattttccccattgtcttggggattaacattcagctcctcgtttttaatgcaaatttctgcacctggcttgaatttctcctcagaaaatgggattttcttttctatcacactgtcaggctgcaaattttccaaacttttatactctgtttccattataaaactgagtgcctttaacagcacccaagtcacctcttgaattattttctgcttagaaatttcttctcccagatcatcctctgcctaaatcacctctctctagttcaaagttccacaaatctctagggtggggcaaaatgctgccagtttatttgctaaaacaaagcaagagtcacctttgctccagtttccaacaagttcctcatttccatctgagaccacctcagcctggaccttattgttcatatcactatcagcatttttgtcaaagccattcaacatgtctgtaggaagttccagactttctcacattttcctgtcttctgagccctccaaactgttgcaacctctgtctgtttcccagttccaaagttgcctccactttttcaagtatctttccagcaacaccccactcctggtaccaatttactgtattagtccattttcacactgctgataatgacatacccgaggctgggcagtttacaaaagaaagaggtttactggacttacagctccacatggctggggaggcctcacaatcatggcagaaggcaaggaggagcaagtcacatcttatggggatggcagcaggcaaagacagagattgtgctgggaaactcccgtttttaaaaccatcagatttcatgagactcattcactatcatgagaacagcacaggaaagacctgcccccataattcagtcatctctcaccaggtccctcccacaacatgtgggaattacgggagctacaagaaaagatgtggctggggacacagagccaaatcatatcaccagtgaattgtatttttatccacttcctctatggtacttgttctgttggttttctcagtcttctctttcatactgtcatttttccttatgtgtcctcaaatttttctttaatgtgtttgctactcatatatctgactggaacattactcgagttattataatagcaaggatgaatttccagtagctcaataggtcctttttctagcagactcctccactgaagttaaaaaatttctggtgacctcattttttaacattcactatgttattaatataaccattttccgatgccaaaaattctaacatactaattttattggttgcatagtttttcatcatagtactgtttactctttctcttattattggatatttgattttttccagcttttcattaaataacatcaagaacacatttgtacatgtatttcttcatgtatctctgatggttttcatagtgttaattcctagagtgaaatttataggtcatgaaagatttctaatagacattgctaaattgtcttttggaagattgtaacaagtctctgtctcataaaaataccctttccccgcagcactcttgataatggcagatcatgttctttttaatctctgctaacttagcaatatacatattacaatatatatatagaatgtgaatattttcctgtttgaatttacatatttgggtgttttcatgagtttcttttgtgaattgactctttatgttctttgcctgtttttctgttcaccattttgtttcgctttgtcagactttattttgggaatgttaagtgctcattataattactgtaagttttttctcagtttgtggtttgcctttaacttttttattatgtgtcttttgctaaatatatgttttgatgacatatatgtaaagccacccactcacctgtccagagattaaatttcatctatatagcttggtatgtttatgatttctagttttacattaaacttttaaatccatgtacatttatgttggaatatggcttatatagggacacatctttgttttttctgaaataactaattagctagcatctttttcattgactggtagttcatcctttccctattaatttgaaatctcacctctgtcatatacaaaatgttttttataaatatgtgtgtgtatctgcctagaaataacttgtccaggcacatcttacaattcttgacatttctaacaagaccactctgttactttactgttttagaaagcacttaagtataatgcttaatctactgtattaaaactgtatacaacagccaggcatggtggctcatgcctgtaatctcagcattttgggaggctaaggcaggaggatcatttgaacccaggagttcaacaacagcccaggcaacatagtgagaccttgactctacaaaaaatttaaaaattagcttggtgtggtggcatgcgccagtggtcccagatattcaggagtctgaggtgggcactcgcttgagcctgggaggttgaggctgcagtgagctgttatcactgccactgcactccagcctgggtgacagatcaagagcctgtctcaaaaacaaaaaacaaaacaaaaaactgtatccagtgcttgtgtattatcctaatttctaaaaatcaatgaccccccaaaatatttccctcatcagaatgttctgttatcagccaaagatttctttctgtcagctcacatcctgccacaataaaggcaaacagtggtagacagggtgaaccattgtgattctgaagcattctaagtggtttcagggatatgaaagtttcatcatcctgttttgtggtaggggaaaaggaaatattgttaaagtaaacattgaaatttgaggtaaataccagtattcgaactttgaaaaagtagccagaatgttcctaaggtggcaacatttcagaaattatacaatttctcaatgccgctagttattggaacagttctaaggctctgcccatgtgttgacatcacattccatctcccttgttcttatagggcttcagccacacagctggttaaggtgcaatttgaccatgactttcttaagaaatgaaaggtacattatggtgctgtaggtcaaatgtgaagtatgtgtcctattttgtgaactattgtagcaaaactaaatcaatgaagggattttgctgagaaagtagttaccagcattcacaaagctggctactgggtgaaaaacctgaattctgagttttgcaattaactgcataacactgagtattacctaataatgattcctttgtttttttcagttccttttgcattatataggtgttttcccaaatgtgttctgaaagacattattgctgcaaggtgctctggaagacatttcagggaccatggttaaatcagttaaagaaaagctgtgtactagatccttctctaagaaatgcactggctgggcacggtggctcatgcctgtaatcccagcacttagggaggccaaggcaggcagatcacttgaggtttagagttcaagatcagcctagccaaaatggtgaaaccctgcctctactaaaaatacaaaaaatgttagccaggtgtggtggcatgcacctgtagtcccagttacttgggaggctgaggctatagaatcacttgagcccaggaggcagaggttgtagtgagccgagagcatgccactgcactccagcctgggcaatgggaatgaaaccctgtccaaaaaaaaaaaagcacaatatgtagtctcatactaaaggctttaagaagtcttacagaaaagaaatttaaatcttttggatctatttcttgacatctgtaggaactgtttcataaaatctactttaggaacctgtattagctgctgtccaaggtatcaaacgtctataattctagttccagtaaaaagttgtatataaataacttactttatatgtagtactttaatttgtaatatcagtatggaatcttcttaaggaaacactgaaaaaaacctttaattgtacaagatctttgtacagtatcatggacttttaaacacagaaacacagagaagtattgttttgtcctgtgaataccaaaactttgatttggatttattagtgagaaaaaagcaggatcaaacgtttccctactttttaggagttctgtgcaatacctcaaattctatccagaatgttcctacaaagtacagtatgatgttagacactctttacatccaacatgttttcttttgtttaatttaatttgagctattattggctcaaaatatatagattcttagtgatcttttatatttattgttcataaaataatgttcggcttcctaataagaaagtgaagaggaaaatcaaggtgttttcatcttgcttgtaggatgggtgctgcagacaatatatataaaggacagagtacatttatggaagaactgactgacacagcagaaataatcagaaaagcaacatcacagtccttggttatcttggatgaactaggaagagggacgagcactcatgatggaattgccattgcctatgctacacttgagtatttcatcagagatgtaagtatccggtaaactgtatttaaaaagaaattaatttgtaaattattatttttaaatgacagtcataattgtgccatatttatggggtacaatgtgatgttttgaaacatataaacaatatggagtgattaaattaacctaattaacacattcctcacctcatttaaatatcattttttgtggtgagacatttgaaatttctcttagttattttgaaatatatattattactgctgtagtcataataccgttatgcaatccctgcatacccttttgtacatggatgatacatattatacacattattttcctgatctcagtctccaaatactcaaaattatcttttttataattgactgcagtcctgcaagtgatcattagaatgctacacactgaattcagacagattgaccctaaataatgtttgtagttttttgatatatgttcctttttttgctgactcaacataaatctggttgtacgaaaaaggccttcctggcaatattttcactcagaattatatcttattatccttggtgaaccctaaatcaagaacaggtaccatccatctacagccaaattcctcgagggaaaaacaaggaaatagtgccatttccactttgtgaaatcctttttttcaccaacatcctgaaggatctcactgtgagatctttgatctcatctctttgtgtttctatctgattcagtaacatcattccttcaatacatgtctcctttttttcagggtgcatttctaagcttcagtgtaaaattttgtttgtgtcaaactttctatccctgtcatttccatctaactctctcctttagtttactttctctatcttgttcattttggtctctgcttttcaaatctccccttcatggcacctctccttaggtctttcccttctctggtctttctttctgttttcccccccattttcttgctcctttgtcattgtgtcttccctcattttcatttctttctctcttccttaaatagccaataaaatcatatttttaatatttcttttcaaaaagcaacacaaaaataaaatgtatttttctttaaccttttgttgccattggtgttttggggtttagttttgtttttaaagcttaatttccatttaatttttttccagaagatagtttttcttcagtctttagagactcagctccatgaacaggctttgatggagatcatggggcagcatcctcagatctaaattggagcagagttgtttggtcctctaggcttcatgagaatgattcctgactaccttgctgtgagcggcagaacttgtgcagtaatacagtttcatacactgtttgggaagcacagagacatcaacgacactcaatttggaaatgtccctgacagctgtaccttctactatatttcaaatgacaaacttctaaatagccttgtccttaggtgtgcatccaacacagtttgtgcagcaaataggttgtacctagctatggccctttttggcacaaccgttgttgttgttcctcctcctcctcttctttctcttcctcctcctcctctttttttttttttttttttttttcttttttgaaatgggttcactctgtcactcaggctgcagtgcagtggcatgatcatggctcactgcagcctcgacctacctgggcccaggtgatccttccacttcggcctcccgagtagctgggactacaggcacacaccaaccatacccagctaatttttgtattcttttaggaatggagtttcaccgtgttgctcaggctagtcttgaactttcaggctccagtgatccacctgccttggcttcccaaagttctgggattataggcatgagttaccatgcccagcctcccttcttttctttgttattttggcagtgaagacccaagagtgactcaggttttgtttaaacatttatttagattacataggtaattataacattttgttttttttaaggaattttttgttttgctttaaaaaatttatttgcaaaaagatgtaactcagaaactttaatcattatagaaactacgtaggaaatgatgagttcatgtcctttatagggacatggatgaagctggaaacgatcattctcagcaaactatcgcaaggacaaaaaaccaaacaccgcatgttctcactcataggtgggagttgaacaatgagaacacatgggcacaggaaggggaacatcacaaactggggcctgttgtggggtggggggaggggggagggatagcattaggagatatacctaatgttaaatgacgagttaatgggtgcaacacaccaacatggcacatgtatacaaatgtaactgacctgcacattgtgcacatgtaccctaaaacttaaagtataataataataaaaaaaagaaactacataggaaagcaattgacttttgtacattaaccttggatcctgcaaccttgctgtaatcacttactaattccagtctgtgtgtatgtttgccaattcttttgaatttcctacataggcagtcatgtcagatacaaacagacagtttcacttctttcttccccatctattttttttttcttgtcttattgcagtaactaggactttcagtacagtgttgaaaaagcagtaagaaaggatatcgttgccttgtttctgatcttagtgggaaagctttgagtttctcaccgttaagtatgatgttagctagaggttgtttgtggatattccttaccaaattgaggaagttctcctctattcctagtttactgagagtttttattgaatgggtgttagattttgtcaaatgctttctgtgcatctattgatatggtcatgtgatttttcttctttagcctgttgatgtgatggattacgttaactggtgttcaaatgttgaatgagtcttacacacttgggatgagtcctacttggttatggtctgtttttctttttatacattgttggattcattttgctaatattttattgaggatttttgcatctatgtttatgagagatactggtttatagttttcttataatgtctttggttttagtattaaggtaatgctggcctcatagaatgagttagaaagtatttactccactcctgtcctctgaaaaagactatagagaattggtaaaatatcttccttaaacatttggtggagttcaccagtgaagccatctgggcctatgattttggttttagaaggccattgactcaagttcttcaatagatatagacctattcagaatttctgttttttttcttgtgtgagttttggctcattgtgtcttttaaggaattgtttttcaagaaattttcaccaaggttaccagatttgtggacatagagttggtcatagtattcctttattatccttttatttgtccacggcatccgtagtgttgtccttttcatttctgatattagccatttgtgtcttttctcttttgttcttagttagcttgactagaagcttatcagttttcttttcaaagaaccagcttttggttctattgattattttccccattgctttcttgttttaatttcattgatttctgctctaatttttattatctcttttcttttgcttatttttgctcttctctttctggtgtcctaagatagaagcttagattgtttattttaaattgttctttttttctaatgtgttcagtgctataaattttctttttttattctttcttttctttccattttttcttttttgagacagggtcttgctctgttacccaggctggactgcagtggcatgaacatagcccactgcaacctcgactccctgggctcaagtgatccttctgcctcagcctcccatgtagctgggactacaggcacatgccacaacacccagctaatttcacttttattttttatagagattggggtctcactatgttgcccaggctggtctcgtattcttggactccagtgatcctcttgccttggcctcccaaagtgctgggattacaggtgtgagccaccgctcctggcctataaattttcttctatgcactgcttttggtgcggttccacaaattttgataaggtgtgcttcctgtttttacttagttccaaatattttaaatttctctttatttcttttttgacccatatgttttttaagaatgtgttgtttagtctccatgtatttggggattttccagttacctttttgttatgattcctagtttaattccattgtggtatgagatcaaatattgtatgatttttattatattaaatttgtcaacatgtgttttatggcccaaaatgtggtctttcttggtgaatgttccatgttagcttgagatgaatgtgtattcagctgttggttgaagtatctatagatataaatgatgtctagttgattgatggtgttgttgagttcagctgtgtccttactgattttctgcctgctggatctgtctgtttcagatggaggaattttgatatctctaactatagtagtatgttcatctgtttctctttgtagttctatcagcttttgcctcatgtagtttgacattctcttgttaaatgcatacatgttaaggatattatgtcttcttggacataagacataatatcctttatcattttatcattatccctttatcattatataatatccttctttatccctgacaaatttacttgatctgaagtctgctctgtctcaaattaatatagctactctaacttcctttagaaattaatatagctgcttcagctttctttaatgttaacatgatgtatcttcctccatatatatatatatattttagatagagtctcactctgtcacccaggctggagtgcagtggtacaatctcagctcactgcaacctctgcctcccagattcaagtgattcttgtgcctcagcctcccgagtagctgggattacaagtgtgtgccaccacgcctggctaatttttgtattctttttaaattaaagatggggtttcaccatgttggccaggctggtcttgaactcctggcctcaagtgatccatctgcctcggcctcccaaagcgctgggattgcaagtgtgagccacctcacctagcccctccatatatttttaatatgtagttatttttatatttaaggtgagtttcttgtagacaacatacagttaggtcttattttttgatccactctgataatctgtcttttaactggtgcatttagatcatcagcattcaaagtgattattgatagagttggattaatatttaccattttttacttttttctatttgttgttcttgttcattgttcctacatgtgtcttccactgtttttctgtcttatgtggttttaactgagtattttatattatttcattttctctctttttttttttttttgttttttgttttttggtttcttggggtgttttttgaggtgggatcttactgtgttgcctaggctggcctcaaactcccgggctgaagtgaccttcccacctcagcctcccaggtagctgggagtacaggtgcatggcactgtgcccagctattttctctcctttcttagcgtatcagttatatttcttgttttactttttctagtggttgtcctggagtttgcaatatacgtttgcaactaatccaagtctactttcaaataacactatattgctttatgagtaatgcacgtattttttaataacaaaataatcctgattactttcttctatcctttgcaccatcactgtcatttatttcacttatacttaagtgtacataagcatatatatatatataaacatacataatcgcatacactgttgctattattattgtgaacaaaatgttatgctagatccactaaaaataagaaaaataaaagtttttcgccttcactggttccttcttcaatgctgcacttttctttatgtagatacaagtttctgacccctgtcattttccttccttctaaagaactttccttaaacatttcaggatagatctgctggctacaaatcctcaatttttgtttgtctgagaatgtctttatttctccttcagttttgaaggattattttgcaaggtacagaattctaggttggagaggtttgttgtttttttttttttttcctctcaaaactttagatattttactccactcttttcttgcttttgtggtttctgagaagtcagatgtaatttttatctttgagcttgtgtggataaggtgtttcttccctctggcttacttcagtattttttttttctttatctttggttttctgtagtttgaatatgatttgtctaggtgtggttttggggacatttatcccgtttggtgttccctaagcttcccagatctgtggttttgtgtctgacattactttggggaaattctcagtcattattgttttaagtatttcttctgtttctttctctctttattttctctctggtattctcattagctgcatgttatatcttttgtagttgtctcaaactttttggatattctgaggtttttttctagtctttttctgtttgcatttccattttggagatttctattaagatgtcctcaagctcagagattcttccctcagctgtgtccagtctaccagtaagctcatcaaacacattcttcatttccatcacagtgtttttgatctctcgtttccttttggttttttcttagaatatgcatctctgtgcttacattgcccatctgttattgcatgctgtctgtgttaaccatagagcccttagcatactaatcagttgcttccaattcccagtctgataattccaacattcctgccatagctatgtctggttctgatgcttgctctgtctcttcatatttgtgggtttttacttttagtatgtcttgcgactttttcttgacagctggctatgatgtattgggtaaaaggaactgctgtaagttaggttttagtaatgtgctggtaagggtctaggggaggagtcctatgattaagtctcagtcttacctccctcccacccctcaggtgggataggaaggctagagtgggctggagttgggtatttcctttctctcatatggaaggctagaggagactggagttgagtctttcccttcccccaggtaggtgaggctttgataaaaccccagcaggttaggctccacttaagtagtttcttctgagggcagaccttgttaagaacagagtgccctggtgcatttcaaaatagttctttctttcttccccttgcctgaagcataaggggaatttactccagtgtttattgtgagaaccaagtggaactcctgggagtaaaactcacaaaagtgtgcccccttcccccatgactcggttcccctgcactttttgactctcagacttgttgacactgagcctccagcaattgatcagttccagttccagttttcctaccctgatactggttccttcagaggtttctgcctccatttcagctcaggaaagttgtgattctttgtatctgcttgtctgtctctaacttgggggacagtggtttgcctgtgacttcatttttcttacagatctaaagagttgatttttcagttggttctactttttccttgtgatggagaggtaacctccaaccttcttatatgctaaactggaaaccagaaacttccctgacctttttatggatgaaaatctttattttcatggttccttctgatctctggatagggaagagagatcagaaaggagcaataagggaggtcatgtgttgctgctgcaggccgagaacagccttgaggagcacagtgtcggatcccagacccttaggtcttccggctaaaagtgcctatcagcttggagaaggagcaccatggagataggtggtcctaagatccctcggggcagattttaagcacagctttttaaagaaatcctgccttaatacgtttatttgttattgttatcagaaagaaggcacacattcagacttttaataaggtgaatggcaggtgaatcaaaactggagttctttgatttaattacctccttctgccaatatttaggctaagattggtgttaactttcctccagatagaggtttccagaatatataaaatatgccttaaaataatgcttattaaagaatccatgagactgggtgcagtggctgatgcctgtaatcccagcactttgggaggccaaagcaggaggaccccttgagcccaggttcaagaccagcctgggtaacatagtgagacccctctctacaaaaaataaaaacaaaaaattagccaggcatagtggtgcacacctgtagtcctagctacttgggaagttgaggtgggaggatcccttgagcccaggagtttgaggttatagtaaactatgattgtgccattgcaatctagcctggatgatagattgagaccctgtctctaaaaaaaaaaaatttgttaattcatactgacactaacaaaaataaactttaaaatggtggaggtgagtggggaaaagtgaaacctctgctttacagaataccaacgaataaatgtaggaagaattttttaatcaacatttaataacgactataataataactgattcagacagcaatgatcaatagattataaaacctttggatgaaagattgttggagaaaaggatattcatatatctcaaagtgtcatgccacaggttatttattaattacaaagggaaaaggtatagtgaagaaatctagtgggtaccctcttcaaccagataatcaaatttggcatccccagttatgtaaaactgatatcacgtcccacctgatgtgatgcactgggaaggacccatcacctacatatacatggaatattcctggtatcgacgaaaagagtcaaactctgtaaaatatttgaagagatttattctgagtcaaatatgagtgaccatggcccgtgacacagccctcaggaggtcctgagaacatgcgcccaaggtggtcagggtacagtttggttttatatattttagggaggcatgagacataaatcaaatacatttaagaaatacattggtttggccgggtgcagtggctcacacctgtaatcccagcactctgggaggccaaggtgggtggatcacgaggtcaggagattgtgaccatcctggctaacacggtgaaaccccgtctctactaaaaaatagaaaaaattagccaggcgtggtggcgggcacctgtagtcccagctactcaggaggctaaggtaggagaatggcgtaaacccgggaggcggagcttgcagtgagccaagatcgtgccactgggcaacagagtgacactccgtctcaaaaaaaaaaaaaagaaaagaaatacattggtttggttcagaaaggtgggacaactccaagcaggggcttccaggctacaggtaaatttaaacattttctggttgacaattggttgagtttatgtgaagacctgggattaatggaaaggaatgttcaggttaagataaaggattgtgggaccaagttttattgtgcagaggaatctctcagcagacttcacagagagagaagaggttgtaaaatgtttcttatcagacctaaaagggtgcctggctcttagttgattatctcgtggatctggaaaggaaggaaaacaaagggtgaaggggatactctatagaatgtggatttttctcacaagagactttgcagggcaatttaaggcgtggcaaggaaatatactccttggggttaaatattttttccttgtctcataatgttgtgccggagtcatattgaaaagcaagtcacaatatacagggtcaaataaaacccatctgatgagaatccatgatatgtagggcatgactccctggaccccttaggtaggaatttgggtaagataaaaaaatcagagtttagtcctcactggcaatgatgtttggaggaaatagcaaagtccaaattgaaagacattatgcaaaacagcataagtgccccctccacccacactctattcctgtacgaaaggatacttgatacttcaaaaatgtccatgtcataaaagacaaaaaaggaaagagacaaaaagaaacattgttgggagaattagggagatttaggaactgtatatgttatataataataatatatttattgagtgtaataattgtattctagttatataggaggatgttttgttcttagaagatagaatcttaaatctttagtgatgaagtgtcatgatgtctgcaactaattctcagatggttcaggaaaaaatgtctgtgtctgtggaggaggaagaagaagggaaatatggtaaaatattaacaattgattatctaggtaaacagtatataataattggtcgttgtacttttcttgtgacttttaggaagatttaaaatttttcaaaagaaagtggaagacagattttaattacaataaaatttaaaaatgaaataacatttattctgtcttattgctttaggtgaaatccttaaccctgtttgtcacccattatccgccagtttgtgaactagaaaaaaattactcacaccaggtggggaattaccacatgggattcttggtcagtgaggatgaaagcaaactggatccaggtatgaaatattcctgcagttggtacaaatattggttttcatgtttgataactcaaagtttgttggaacatgaacttactgcttattaataatgaaagctgtgaatgtgagctataaataacatttgtcaggattcatttttgctaagctttaggtcaagtagaatttagatttatccttgctatctctgagtccttctctggtcttccttgtctcatttgtcgtggcaacccttttctctttttttacaggaatagggtgtgggtggagggggcacttaggttttcctcttagtgccttgtactcttacatgattcatctcagtacagatgacagtcacctgcagagtataattagtcatcttttaaaaacgcccaatattttccccaaaatatcatttaacttactaagggccatatactgtactggacataggtttttattttaatattataaggaaactgaatctcagacaggtaaagtggtttgaccatgtcaaccacttagatgggggctaaaatgagcctagaattcacttcttctgcttctgggttctcttctgttcccctctgctagagctgctatggaggaaatctacaatatttttcctagtctttccagttactggtgtcacagaaatgagacattttatgaaaaagaacaccgttagccaatagcaatacatttaagtgccataagtaatacagtagactttagcatttttttttctgttcagtagtaattgttttaagccaccagcctgtagtcctgtggtggtttgcgcaattggtatgctgcaatggaaaatccatcatgcaagataccccagagtccagattttattttggaaaagtaatagggatggacctgaaaaagaaatcaggcagctggcccaaataaaacaaagcactgggcctaagataaatgtaatgttaggcagttcctgcttttcaccaccatgcaatcttgaaaaacacatcataaattctcttatggaagtagttttgtatctattaatctgcatccaggttgacaagaggagacttaagctaaaacccttgggacaaagagaatagagttcaccaacagggaagaagaggagtcagtgccgctaatacgcatttgatgtgaactgaaaactaacccagagcattgtacctttcccttaaatgttctgtgcattttattttattgattttaatttttgtgttttgttgagatggggtgtcactgtcatccaggctggagtgcagtggcacgatcatagctcactgcagacacaacctcccaggcccaggtgatcctcccatgtcagcctccccggtagctgggactacaggtgcacaccaccatgcctggctgatttttgtatgttctgtagagacaggctctcactatgttgcccaggctggtctcaaactgttgaattcaagtgatcctcctgccttggcctcccaaagtgctgggattacagggatgagctaccttgcctagctgattttaatttttatcaatgaacataatttttaaaattcaatggtgctaaaaggctcctgctgacaagcttccatcccttcagttcacgtccttccccatcctagtcccaaggcaactactttcaacacttcccctttctgttgtatttctaagtaatatccgtattttcatgtctcttgcttcatcaagttgacacattattgatggacctctcattgtgttaattgagaatcttcaattttcccttcctctgtccttccagtatagtcatttcacatgtattgtatgtcattcatacttgttgttttcattattattgccatgctaaatattgcttactgatgagccaagtttggagacaagtacatttctttcttttacaacgttttctattttctcaaaaataagaattgactgtcctcattttttccattttgttttgttttgtttttgagtctatagctgaatcttcctgtaccctcagatagcttcgtaaaatgcctctctagatgtttttccacacaactgaacctactggttcccatttgtccactggggcccttcctcctggagccctttgtcctcctgctcatctgaactggctgctgtctgggcctgcggcacagctgtcatcctaagcctgccttgctggcatcctaggagttcccttacccctcttctaagcatgtgattgcaaggaacaaaacactcggtctcacactggctcagacaaaaggatgcagtatatataatcccatgttccatgacttccagaggaagagtgggcttcagctcctcctttttgtaattcccaggctctgtcttcctgcctggccagctttattatcaggctagtgacaatgactgcagctcttcctggcatcatgtccagaatgtccaaaggaagaagagacaagcatttcctgttcactctttcttagaacaagggaactttttctcagatgccttccagtatctcatgattgcctcattgcattttcagaattgagtaacaggctccttcttaaaccactccttagcagaggatggcaggggtgactttgatgggcctagatgaatcaggatcaacttctggagctggctttgaagacccagtcccctgagttaaatgattagggagttaattccttataaaatcaaggttttcttaggggtggaataaatgttgaattaggctactactaatatcaactaaaggaggtaaaagttttgagatttttcatgaatgaaaatgtttcacatgcttgttggccatgtatatgttgtcttttgaaaagtatctgttcatgtcctttgcctattttttaatgggtttggttttttcttataaatgtaagttccttatagatggtggatattagacctttgtcagatgcatagtttgcaaacattttctcccattctgtacgttgcctgtttaccctgttcatagtttcttttgctgtgcaaaagctttatagtttaattaggtcccctgtgtcagtttttgcttctgttgcaattgcttttggcctcttagtcatgaaatctttgcccgttcctatgtacagaatgataaaagcaaaacatcactgaccattagagaaatgcaaatcaaaaccacagtgagataccttctcacaccagtcagaataggtattattaaaaagtcaaaaaataacaggtgctggtgaggttgtggagaaaaaggaatgcttatatgctgggtgagagtgtaaattagttcaactgttgtgtaaggcagtgtggtgattcctcaaagacctgaagacagaattaccattcaacccagcaatcctgttactgggtatatacccagagaaatataaattgttgtgtcataaagacgcatgcacacgtatgttcattgcagcactattcacagtagcaagacatggaatctacctaaatgcttatcaacggtagactggttaaagaaaatgtggtacaaatacactgtggaatactatccagccataaaaaacaataagatcatgtcctttgccggaatatggatgaagctggaggccattttccttagcaaactaatgcaggaacagaaaaccaagtgttgcatgtttcacttataagtgggagttaaatgatgagaacacatggagacatagcggggaacaacatacactggggcctactagatgggggagggtgggaggagggagaggatcaggaagaataactaatggatacaaggcttaatacctgggcgattaaataatcagtacagcaaacctccgtgacacaagtttacctctatagcaaacctgcacatgtacccctgaacttaaaagtttaaaaaaaaaaacaacaactctatagcttccatgttcgaatttatagttcagccaggattagaattttagattgaaaaccatttcactcagaattttgaagcagtgctccactgcctgctgccttccaatattgttcctggctatatctgtgcttcatccattacctcttccccaacttctcctcttctgtatgaggtagaggccattgcgtaggtcatcagtaaaatgccccacaggtcttttggatggcttctataatactctatttcctatgatgtgataggtaaaacaatggacaaacagttaagaaacctgtgttttagtctattccaatctgtatgatcttgaacaagtcacctaacttcactcacccctaaatttttatgaatctgttctaaaagcaacttcagaaattatttgtcagtacacatctctttaataactgcttagagaagtttggcttaaatataaatcttgctatgtttccccataataagcagaaacatgaattattacttccactgactcaaagcagtgccaggtaaacattttaataatgtccatttaagaaatggccatagcttgtaagtagttacatcctcatcaagaacttttgctgtgagcctgtaaagaaatagagtttttctcataaaacaagttttattctctcccatgtggctttttctgactccatatttccatcctaccagcacccccaacccctctcgcacacagaggttaaaggagtacataattacagaaagagatcccccaggcgattatagaagagtggttgcgttctttaccttgaagatatgagaactaccataatttaaagtggagaccagcatataatgatacactcagcaactgtttgtatgttaacaaggtattcagagcagtgaaatattttatgtaagttagctatattttgtagctatattatacattatatatataattatataagaacattgttacaactatctcttgtgcactctttatatatgtatacatatatacatatatatacatatatacatatatatatacatatatacatatatatacacacacacacacacacacactatataaaaaaattaaaagtcattaataggctgggcatggtggctcacgcctgtaatctcagcactttgggaggccaaagtgggcagatcacctgaggtcgggagttcaagaccagcctgaccaacatggagaaaccctgtctctactaaaaatacaaaaagtagccgggcatggtggtgcatacctgtaatcccagctactcaggaggctgaggcaggagaatcacttaaacccgggaggtggaggttgtggtaagtcgagatcatgccattgtactccagcttgggcaacaagagcgaaactccgtctcaaaaaaaaaaaaaaaaaaaattcattaacaaatttttggatagggggattttgtggcatttatcaggctcccagaaaatactgatggctggatggatggatagatggacagacagacagatgaatgaatcttgtttagaaaggtcagcatgggatctagattatattggagagctggagacagggagatcagttaggactaacacagttgaagtgataaactatttttctgtcttaaagttaagaaatggctttttttgattgcctattgcctttcacttcactcttagtcttgtgaactttgaagagttacaaaaaattatccaggtttgcaggcactggcttctagctgcatcttccctaatctgttcccacctacttccgcacctgtgtttctcaactttcatttgggggcaaaaggtactgtcagtgccttgcaacggaagtttaggtctgtgtttctgagtgagttggcattctttccacctcccacttcagcacccacccttggaaagctcttatctgtctgctgccgaattcttagaggagggccaggaaaaatccattgtcctttttctctgtcatgttcagtctttggctttttaaattttcactgataaaagaagaaaagcatacacatctatcaaatgaaataatgattgagaaaaagcttttaataaactcataagtatactgggattgtagaaatctttgtaactcttgtccaccttggacatttctgcagcacagtgcacattttgcagcacaattatattgaatttcataataaaagttacataatatcctgagctgctttagcttaaactacatgcagtggtttatgataattattgtacttcattatatcccagttcttttaaagttttaagttcatgtgtatgtatatatatgacaggctgggtcctctaggaggcagattctgagatttgcattcaggaggttcattcggagtgctgggctgtgttatggtcaaaaggcttcagccagccctgcagagaactctgaggctagagtggtccttcagagttacctcaacttggggtgagggggatagacctctatacctttattagttatctctattagtttggggtaatttgcaaacagtgtgcaacagattaccccccaaaacatagcggcttagaacaacaaacatttattacctcataatttctgtgagtcaggagtccaggtgcaacttagctgaacacctctaaggctgaaaactgtagccctgtaagagaccctctagttcggttcctcacagggctacagtcagtcactaatcagggcagcagccatgtcaaggcttcccagcccacacatggctcttgccaagcctcccaatatctgcttccaagcccactcatgtggctgttggcatgccttaggctctcaccaactgttggtgggagacatcagtttctttccatgtgagcatctccacagacagcccacaacatggcggctggcttccctcagagcaggcaggcaacaaaatgagagtacccaagtcagaagccacaacctttctgtaacctaatctctgaagtgacatctcatcacttttgccgtattctgtttgttagaagtgagtcactggttaggaatgatacagagagggaatgacacaagcacgtgaacaccagcaggcagaggtctttggtggccatcttagaggctgcctacaacaaccagtcactggctgtaggctgccccaaagcgggatgtggtcttgggtgaagcccctcccttcagctgcaacaatttccaaagaaggcaaacagtcgagggttgcaggccagcaatctttctgacagctgagggaataaactctttagtcctaagtgggatctgggtggtactgaacagaatccggtatgtatagctcttagttaacctgaatatttaataaaccagaccatcttaatcctgttatttaaactggccaacatgtaatattttcttttctgtttttaagggagaaattataggcctggtatggtggttcatgcctgtaatcccagcactttgggaggccaaggtgggtggaccacttgtgcccagaagttcgagagcagcctgggcaacatggccaaaaccccatctctacaaaaaaaaaattagctaggtgtggtagtatgcacctgtagtttcagctactcgggaggctgagatgggataatcaccttgaacctggaagattgagactgccagtgagctgagattgcgccactgcactccagcatggatgacagagtcagaccctgtctcagaaacataaaaaggagaaattatattgtatcaaccacgtactaagatcattctcatcctggcgcagtggctcacgcctgtaatcccaacactttgagaggccaaggagggaggattgtttaaagccaggagttcgagaccagcctgagcaacatagcaagacctgatctctacaaaaaatattaaaaaattagctgagtgtggtggcatgaacctgtagtcctagctacttaggaggctaggcaggaggattgcttgagcccaggagtttgatgttacagtaaggtatgattgtgccactgcactccagcctaggtaatagaacaagaccctatctctaaaaaagtaaataaataaaaacattctctttttaatatagacgttcagttcaaatttgcaatgaatcattgttaaaaactattttaagtgaactaaaagatagatcctatatgcacacagcagtttcaaaacagtatttacccttttctagacatatcaaattgataaatggatctaacaggcaagtaggaacagtgatttcagattgtacgatttaataaagttatgagaacttacatgtcctttttaatcctctaatttatttcagctttcaggcacagttttgatctcctttctttatttcacaggcgcagcagaacaagtccctgattttgtcaccttcctttaccaaataactagaggaattgcagcaaggagttatggattaaatgtggctaaactagcagatgttcctggagaaattttgaagaaagcagctcacaagtcaaaagagctggaaggattaataaatacgaaaaggtcagagtgattatgctgcattttttcatttgtaatgaaaccttctaagttgtccaagaaagagaggagcgtcctaaaaatgaacatcaggtctacttttaagcacctcttcaaatattctgaaccatttaattatgatgaagtgaaaacagctcttgcaaagctcaggtgaattcagtccatcttcattagatcattattaagttgctaaattggtttttcggtcatttttataaagaattaagttaactccttaatatgtgccacattcattactttaaagattcagtatgccaaaggttactgaagatattgagaacctacagaagatttcttttattcatagattttattcagatatgcaacgattacatccagaaattctatcagagcattaatgaaaataatagtattacataacaggcaatcacagtcagtatccacatgtcacttattttgtagattgtgacaaatttttcattctaaacaggctgctgtcactttaaatgcttatgggaatactttccacctttacgcttgctatccagctagtatgtagtcagtacataaattaatcttaatgtaaacctgagatacactttgaaagaaagatattcctagaaaaatatcatattagtaaattatacccttttgtttcccaaatataaaattctaaaacaacataagctccccatccacctactgccccacccctgccgtacttggggagcctggtgtgctgggtacattagtaccctggttgataatcatatgaccatgatgaacagattgttgatcgaatagaaaatcttggctggctactggtggtccctgtgttatactccaataatattctttaatatttggttataattctgggaattattaccaaatttcaatattgaaatagtaatgcctatcatactagctaaagaaacagttgctaacttgtttaccaaagtacagtagtgcagttaacttctctttctctacctccttctcctgtgcttccgccttgcactcctccacttcggtatactgtagttcaccaagtccagagtgctggactctacaaatggcacacagcctcctctagtgacactcttttctggctcatttccaaattgcaatgccaaaacagaagcaaagtggcataatcagtttcagcctatttctgttacaagccagattaatataaaatttttcctgagggaaaagtatctatgagaatttaaaaataaacttagccctcttcctctgcaaagtccagagacaaattaaactctttagttgccatattattattgttctttttctctgaaaaaaacctagaataaaactttactacaaaggatatatatacaagatagtaataaaatatgtcaatttctaaatttgctgtagaaatatatgcaagatagcaataaaatatggcaatttctatattttcatatattcttgtttctgctatatagcctataaagcaagagcaaaaaaactctcagattactcataaatattttaactcttccaactagtaagtgacattttgaactctatgaagttatcttgacaagatgagagaattattagaagacattgcattgggatggaatctgatcatttatcaagatactgtatttgttattttaccttttttctaaaagtgcttatcacatcaattcctttggccagatcaaagaaatcaaactgcatcttgggccttactgtggatttgttataatagttgctatttgttggatggttactgtgtgtagaaaccattctgagcagtcatttgcagcagcctacacactgtgccagctactcttctcatcactttacatacattatctcatttcatccttatggcagccttatcctcatggtatagttggggaaagtgagaccagcaaggacaggacactgacccagagtcacacagctacttgatggtggagcagtaattggaactcaggtactctagctccataccctaaatagtcaattgggttgctattctgcagaaaaaaaaaaaaagtaagtctgtgttatgctggcgttttactctttaattagcttcattgttttcggttggtgttacttttcatcctgggaacacttcataggagtttcttttctccaggtacaaataagcacacaccaccagcctctagcagagtttgaaggaggaggaggtcaggttctcccctctggggctggcaggggtaaggattttaggagaaggcacaaaggtaatagtggcaattggtaacctgggtcccttgattatagtagcagctctgaaagctcctttcactggaagggtgacactgacacagcttcctaactatagagcctgcccggtattcaagtgttatagacttttcatagcttctgatgagacgtattgtctcccagcaatttcatttattaaataagtagtatttgatttttccccagaaagagactcaagtattttgcaaagttatggacgatgcataatgcacaagacctgcagaagtggacagaggagttcaacatggaagaaacacagacttctcttcttcattaaaatgaagactacatttgtgaacaaaaaatggagaattaaaaataccaactgtacaaaataactctccagtaacagcctatctttgtgtgacatgtgagcataaaattatgaccatggtatattcctattggaaacagagaggtttttctgaagacagtctttttcaagtttctgtcttcctaacttttctacgtataaacactcttgaatagacttccactttgtaattagaaaattttatggacagtaagtccagtaaagccttaagtggcagaatataattcccaagcttttggagggtgatataaaaatttacttgatatttttatttgtttcagttcagataattggcaactgggtgaatctggcaggaatctatccattgaactaaaataattttattatgcaaccagtttatccaccaagaacataagaattttttataagtagaaagaattggccaggcatggtggctcatgcctgtaatcccagcactttgggaggccaaggtaggcagatcacctgaggtcaggagttcaagaccagcctggccaacatggcaaaaccccatctttactaaaaatataaagtacatctctactaaaaatacgaaaaaattagctgggcatggtggcgcacacctgtagtcccagctactccggaggctgaggcaggagaatctcttgaacctgggaggcggaggttgcaatgagccgagatcacgtcactgcactccagcttgggcaacagagcaagactccatctcaaaaaaaaaaaaagaaaaaagaaaagaaatagaattatcaagcttttaaaaactagagcacagaaggaataaggtcatgaaatttaaaaggttaaatattgtcataggattaagcagtttaaagattgttggatgaaattatttgtcattcattcaagtaataaatatttaatgaatacttgctatagatgatggtatgtcccattgaattttggtgtttccaagtgtttggaaattgtcattttttaaggtgtaattatgaaattaaggttactgctttgaccagcgcaatacacagaagtgaacttgttcatttgggacctttctgttcattaacatatcaggtgtatcatcttcccagtaatgagccttatagcttagttgattcataacagtgctcccttcctgcaaatttagggtaacacgtgctcaactgtgtccctgggttttttacagcacttacaatctggcttcccagatccatgtgttctttttgtttctaaatatatgatcttgcacaaaagctctccatcctattttcctctcttttattatttctgctcagttaaatgtcttccccacatttgatggacatatttttaattccttcttctggattattatcttcagtgatcccagcaatgaccccagccagacacaggagtcaatacagtgtccccaagttgtggcttcacttttgagtcagtcactctttagctatctgactctcaaccttattggagttagagtgtgatgtaatttgattgattctaccacccctccagaaatatgaacgtatagtcagattctcaaaactgtcaaaatagttagttggaatgtacgctttaaattttaaaaagaacaaaattgttccaatactctatataactgtaaatgtcttatattttttctaacaagatttcaaagatagtgctgtaacctcacctcacagggagaaaaggagataactccaggaatttcatgcccatgccagagggagctgcagggaccagcaatcactggtaatgtccaggtggacatctggagccacctctccctcttgcttggtccaggccagcatcaacactgaagcaggtaggggttccaggagcattgtgtcctggcagtggcagcacacagtgtctggcagctgacaacgtggaactttacagggtagattgtccagcatgatcaggaagccagccaggcggccagcttgagggaaggcaggcctcctccaagctggggaagagatcagcacagctgaactgcatttccaagtgagactcatccccagctgggttactgagatattggaggaaacgttgaggccaaatcccagtcataaagactgcacaaatgccatggggaggtaggcagaaagttgcaaacaagtgggtttgtatttcagataaccatcttggggctgcaattctaaagttagatataatcacacaggtgagaatagggctgctggtgcatggcaagcgccctccacattccctctggtactgcataggcatgagcctgcaggctaaatgtcttccatacttcagacagaggctaggggagacagggctgactggtggccaaatgtcaaggaaagtaactttttaatacgatatattcctttaagtgacttgtccgtttttagccatcaaattacaaattaagagctagtgattctgcagtaacacacaccaattcctcgaaaaccttctaaagtcacaccagtttaataattccaaccttagggaaacaaagccaaacatattttaacaagtttgaactttgacctttctattgcttcatctctcctcagtgctgtttattctatatagtttttaaaatagtgttattatataactagtataaaatatttgaaaatccatgggactatataatttaaaaagagaaaaaaggaaaaatgaatttttaaaattaaattttgtaaggtaaaaataaatttaaaggctgggcgtggttgctcacacctgtaatcctagcactttgggaggccgaggtgggcagattgcctgagctcaggagttcaagaccagcctgggcaactcggtgaaaccccgtctctactaaaatacaaaaaattagccaggtgtggtggcatgcgcctgtagtcccagctactcgggaggctgagacagaagaattgcttgaacccaggaggtggaggttgcagtgagccaagatcacaccactgcactccaccctgggcaagagagcaagactctgtctcaaaaaaacatttaaaggaaaaaaaatataaaaacctcagcatttgagttacttaatttatctcaatgtttctcagtgctgaatatgaaaatcaaatgattcccatttgaatcatagacttttggactgagatccaagcttagtattcttttatcagctttattgacatagtttacatactgcacaatttatttagagtgaataattcagtgggtttttgtgtattcacaagcttgtacaactgtcactacaatcaattttggaacattcttaatcaccctaaaaagaaatgctgtacctattaactgccagtctgcattcctccccaagatcgtcagccctagacaacccctaatcttcattctgtctctatagatttgcctattttggacatttcatatgaatggaaccatagaatatgtggtcttttgtgtctggtttctttcacttagatgcaagattcatctgtgtgtcagaacttcattctctttaactggtaaaaagtattccattttatgtataccttacattttaatttatccattcattagttgatgcacatttggattgtttctatttctagctattatgagtaattctaccatgaatatttgtgtataggtttttatgtgacgaggcataatattttttaaaaagctcccctagtaattctgatgtgcagtcaggtttgtgaaccattagtctcaaagatgacagatgactaaacagtatttttaattgagttgacaatcatttggtctgtttgtccactgctttatctgtcacttagggcagagtgtagcatactgtagaccctaattaatatttgttaaagtggaaaagaaaaaccaaactccttcagcttagaaacccaatgaaaagatgtttcttttcataatgaaggcaccatttcactagggattcaagatccatacagaagtgtgctatatctttagaaaaaaaaactttttcagacaatttttccaagtttgtgcctgtcgtcatcatggtgatggtgttggggctggtgaaacactgcccactgcatcaattccagagtaaaaactagattgaatccaaaattttctataaattagtgttgacctttactgagttctg

SEQ ID NO: 3 - DNA, 4374 bp, Homo sapiens
gggcacgagccctgccatgtctcgccggaagcctgcgtcgggcggcctcgctgcctccagctcagcccctgcgaggcaagcggttttgagccgattcttccagtctacgggaagcctgaaatccacctcctcctccacaggtgcagccgaccaggtggaccctggcgctgcagcggccgcagcgcccccagcgcccgccttcccgccccagctgccgccgcacgtagctacagaaattgacagaagaaagaagagaccattggaaaatgatgggcctgttaaaaagaaagtaaagaaagtccaacaaaaggaaggaggaagtgatctgggaatgtctggcaactctgagccaaagaaatgtctgaggaccaggaatgtttcaaagtctctggaaaaattgaaagaattctgctgcgattctgcccttcctcaaagtagagtccagacagaatctctgcaggagagatttgcagttctgccaaaatgtactgattttgatgatatcagtcttctacacgcaaagaatgcagtttcttctgaagattcgaaacgtcaaattaatcaaaaggacacaacactttttgatctcagtcagtttggatcatcaaatacaagtcatgaaaatttacagaaaactgcttccaaatcagctaacaaacggtccaaaagcatctatacgccgctagaattacaatacatagaaatgaagcagcagcacaaagatgcagttttgtgtgtggaatgtggatataagtatagattctttggggaagatgcagagattgcagcccgagagctcaatatttattgccatttagatcacaactttatgacagcaagtatacctactcacagactgtttgttcatgtacgccgcctggtggcaaaaggatataaggtgggagttgtgaagcaaactgaaactgcagcattaaaggccattggagacaacagaagttcactcttttcccggaaattgactgccctttatacaaaatctacacttattggagaagatgtgaatcccctaatcaagctggatgatgctgtaaatgttgatgagataatgactgatacttctaccagctatcttctgtgcatctctgaaaataaggaaaatgttagggacaaaaaaaagggcaacatttttattggcattgtgggagtgcagcctgccacaggcgaggttgtgtttgatagtttccaggactctgcttctcgttcagagctagaaacccggatgtcaagcctgcagccagtagagctgctgcttccttcggccttgtccgagcaaacagaggcgctcatccacagagccacatctgttagtgtgcaggatgacagaattcgagtcgaaaggatggataacatttattttgaatacagccatgctttccaggcagttacagagttttatgcaaaagatacagttgacatcaaaggttctcaaattatttctggcattgttaacttagagaagcctgtgatttgctctttggctgccatcataaaatacctcaaagaattcaacttggaaaagatgctctccaaacctgagaattttaaacagctatcaagtaaaatggaatttatgacaattaatggaacaacattaaggaatctggaaatcctacagaatcagactgatatgaaaaccaaaggaagtttgctgtgggttttagaccacactaaaacttcatttgggagacggaagttaaagaagtgggtgacccagccactccttaaattaagggaaataaatgcccggcttgatgctgtatcggaagttctccattcagaatctagtgtgtttggtcagatagaaaatcatctacgtaaattgcccgacatagagaggggactctgtagcatttatcacaaaaaatgttctacccaagagttcttcttgattgtcaaaactttatatcacctaaagtcagaatttcaagcaataatacctgctgttaattcccacattcagtcagacttgctccggaccgttattttagaaattcctgaactcctcagtccagtggagcattacttaaagatactcaatgaacaagctgccaaagttggggataaaactgaattatttaaagacctttctgacttccctttaataaaaaagaggaaggatgaaattcaaggtgttattgacgagatccgaatgcatttgcaagaaatacgaaaaatactaaaaaatccttctgcacaatatgtgacagtatcaggacaggagtttatgatagaaataaagaactctgctgtatcttgtataccaactgattgggtaaaggttggaagcacaaaagctgtgagccgctttcactctccttttattgtagaaaattacagacatctgaatcagctccgggagcagctagtccttgactgcagtgctgaatggcttgattttctagagaaattcagtgaacattatcactccttgtgtaaagcagtgcatcacctagcaactgttgactgcattttctccctggccaaggtcgctaagcaaggagattactgcagaccaactgtacaagaagaaagaaaaattgtaataaaaaatggaaggcaccctgtgattgatgtgttgctgggagaacaggatcaatatgtcccaaataatacagatttatcagaggactcagagagagtaatgataattaccggaccaaacatgggtggaaagagctcctacataaaacaagttgcattgattaccatcatggctcagattggctcctatgttcctgcagaagaagcgacaattgggattgtggatggcattttcacaaggatgggtgctgcagacaatatatataaaggacggagtacatttatggaagaactgactgacacagcagaaataatcagaaaagcaacatcacagtccttggttatcttggatgaactaggaagagggacgagcactcatgatggaattgccattgcctatgctacacttgagtatttcatcagagatgtgaaatccttaaccctgtttgtcacccattatccgccagtttgtgaactagaaaaaaattactcacaccaggtggggaattaccacatgggattcttggtcagtgaggatgaaagcaaactggatccaggcgcagcagaacaagtccctgattttgtcaccttcctttaccaaataactagaggaattgcagcaaggagttatggattaaatgtggctaaactagcagatgttcctggagaaattttgaagaaagcagctcacaagtcaaaagagctggaaggattaataaatacgaaaagaaagagactcaagtattttgcaaagttatggacgatgcataatgcacaagacctgcagaagtggacagaggagttcaacatggaagaaacacagacttctcttcttcattaaaatgaagactacatttgtgaacaaaaaatggagaattaaaaataccaactgtacaaaataactctccagtaacagcctatctttgtgtgacatgtgagcataaaattatgaccatggtatattcctattggaaacagagaggtttttctgaagacagtctttttcaagtttctgtcttcctaacttttctacgtataaacactcttgaatagacttccactttgtaattagaaaattttatggacagtaagtccagtaaagccttaagtggcagaatataattcccaagcttttggagggtgatataaaaatttacttgatatttttatttgtttcagttcagataattggcaactgggtgaatctggcaggaatctatccattgaactaaaataattttattatgcaaccagtttatccaccaagaacataagaattttttataagtagaaagaattggccaggcatggtggctcatgcctgtaatcccagcactttgggaggccaaggtaggcagatcacctgaggtcaggagttcaagaccagcctggccaacatggcaaaaccccatctttactaaaaatataaagtacatctctactaaaaatacgaaaaaattagctgggcatggtggcgcacacctgtagtcccagctactccggaggctgaggcaggagaatctcttgaacctgggaggcggaggttgcaatgagccgagatcacgtcactgcactccagcttgggcaacagagcaagactccatctcaaaaaagaaaaaagaaaagaaatagaattatcaagcttttaaaaactagagcacagaaggaataaggtcatgaaatttaaaaggttaaatattgtcataggattaagcagtttaaagattgttggatgaaattatttgtcattcattcaagtaataaatatttaatgaatacttgctataaaaaaaaaaaaaaaaaaaaaaaaaa

SEQ ID NO: 4 - DNA, 22 bp, Artificial sequence
  Primer
agctagaaacccggatgtcaag

SEQ ID NO: 5 - DNA, 20 bp, Artificial sequence
  Primer
gatgagcgcctctgtttgct

SEQ ID NO: 6 - DNA, 23 bp, Artificial sequence
  Probe
tgctgcttccttcggccttgtcc

SEQ ID NO: 7 - DNA, 22 bp, Artificial sequence
  Primer
ttttattggcattgtgggagtg

SEQ ID NO: 8 - DNA, 20 bp, Artificial sequence
  Primer
ttgacatccgggtttctagc

SEQ ID NO: 9 - DNA, 27 bp, Artificial sequence
  Probe
aggcgaggttgtgtttgatagtttcca

SEQ ID NO: 10 - DNA, 20 bp, Artificial sequence
  Synthetic oligonucleotide
gtcttcattttaatgaagaa

SEQ ID NO: 11 - DNA, 20 bp, Artificial sequence
  Synthetic oligonucleotide
catccacaatcccaattgtc

SEQ ID NO: 12 - DNA, 20 bp, Artificial sequence
  Synthetic oligonucleotide
ttaagtaatgctccactgga

SEQ ID NO: 13 - DNA, 20 bp, Artificial sequence
  Synthetic oligonucleotide
ctttgaggaagggcagaatc

SEQ ID NO: 14 - DNA, 20 bp, Artificial sequence
  Synthetic oligonucleotide
tttatagcaagtattcatta

SEQ ID NO: 15 - DNA, 20 bp, Artificial sequence
  Synthetic oligonucleotide
ctgcagcacccatccttgtg

SEQ ID NO: 16 - DNA, 20 bp, Artificial sequence
  Synthetic oligonucleotide
atttctaaaataacggtccg

SEQ ID NO: 17 - DNA, 20 bp, Artificial sequence
  Synthetic oligonucleotide
gctctactggctgcaggctt

SEQ ID NO: 18 - DNA, 20 bp, Artificial sequence
  Synthetic oligonucleotide
tttgcataaaactctgtaac

SEQ ID NO: 19 - DNA, 20 bp, Artificial sequence
  Synthetic oligonucleotide
actttctttttaacaggccc

SEQ ID NO: 20 - DNA, 20 bp, Artificial sequence
  Synthetic oligonucleotide
catcctgcacactaacagat

SEQ ID NO: 21 - DNA, 20 bp, Artificial sequence
  Synthetic oligonucleotide
aaaatcaagccattcagcac

SEQ ID NO: 22 - DNA, 20 bp, Artificial sequence
  Synthetic oligonucleotide
gataaactggttgcataata

SEQ ID NO: 23 - DNA, 20 bp, Artificial sequence
  Synthetic oligonucleotide
ttttgtataaagggcagtca

SEQ ID NO: 24 - DNA, 20 bp, Artificial sequence
  Synthetic oligonucleotide
aaatgccatccacaatccca

SEQ ID NO: 25 - DNA, 20 bp, Artificial sequence
  Synthetic oligonucleotide
gtgtcagtcagttcttccat

SEQ ID NO: 26 - DNA, 20 bp, Artificial sequence
  Synthetic oligonucleotide
ctggactgaggagttcagga

SEQ ID NO: 27 - DNA, 20 bp, Artificial sequence
  Synthetic oligonucleotide
ttaaaattctcaggtttgga

SEQ ID NO: 28 - DNA, 20 bp, Artificial sequence
  Synthetic oligonucleotide
ctggtcctcagacatttctt

SEQ ID NO: 29 - DNA, 20 bp, Artificial sequence
  Synthetic oligonucleotide
ctgtccataaaattttctaa

SEQ ID NO: 30 - DNA, 20 bp, Artificial sequence
  Synthetic oligonucleotide
agaagtctgtgtttcttcca

SEQ ID NO: 31 - DNA, 20 bp, Artificial sequence
  Synthetic oligonucleotide
tcaaaataaatgttatccat

SEQ ID NO: 32 - DNA, 20 bp, Artificial sequence
  Synthetic oligonucleotide
gatggcagccaaagagcaaa

SEQ ID NO: 33 - DNA, 20 bp, Artificial sequence
  Synthetic oligonucleotide
agttcaatggatagattcct

SEQ ID NO: 34 - DNA, 20 bp, Artificial sequence
  Synthetic oligonucleotide
tgacaatatttaacctttta

SEQ ID NO: 35 - DNA, 20 bp, Artificial sequence
  Synthetic oligonucleotide
agtaatctccttgcttagcg

SEQ ID NO: 36 - DNA, 20 bp, Artificial sequence
  Synthetic oligonucleotide
agtttcagtttgcttcacaa

SEQ ID NO: 37 - DNA, 20 bp, Artificial sequence
  Synthetic oligonucleotide
gttgtgatctaaatggcaat

SEQ ID NO: 38 - DNA, 20 bp, Artificial sequence
  Synthetic oligonucleotide
acataggagccaatctgagc

SEQ ID NO: 39 - DNA, 20 bp, Artificial sequence
  Synthetic oligonucleotide
ggtattattgcttgaaattc

SEQ ID NO: 40 - DNA, 20 bp, Artificial sequence
  Synthetic oligonucleotide
ctacagagtcccctctctat

SEQ ID NO: 41 - DNA, 20 bp, Artificial sequence
  Synthetic oligonucleotide
caaggagtgataatgttcac

SEQ ID NO: 42 - DNA, 20 bp, Artificial sequence
  Synthetic oligonucleotide
tctcctgcagagattctgtc

SEQ ID NO: 43 - DNA, 20 bp, Artificial sequence
  Synthetic oligonucleotide
gttcaatggatagattcctg

SEQ ID NO: 44 - DNA, 20 bp, Artificial sequence
  Synthetic oligonucleotide
cagtcaaggactagctgctc

SEQ ID NO: 45 - DNA, 20 bp, Artificial sequence
  Synthetic oligonucleotide
ttcatatcagtctgattctg

SEQ ID NO: 46 - DNA, 20 bp, Artificial sequence
  Synthetic oligonucleotide
cggcgagacatggcagggct

SEQ ID NO: 47 - DNA, 16 bp, Artificial sequence
  Synthetic oligonucleotide
aggagcgcgagcccgc

SEQ ID NO: 48 - DNA, 16 bp, Artificial sequence
  Synthetic oligonucleotide
actggaagaatcggct

SEQ ID NO: 49 - DNA, 16 bp, Artificial sequence
  Synthetic oligonucleotide
atcgcagcagaattct

SEQ ID NO: 50 - DNA, 16 bp, Artificial sequence
  Synthetic oligonucleotide
ctggactctactttga

SEQ ID NO: 51 - DNA, 16 bp, Artificial sequence
  Synthetic oligonucleotide
tcctgcagagattctg

SEQ ID NO: 52 - DNA, 16 bp, Artificial sequence
  Synthetic oligonucleotide
cgtttcgaatcttcag

SEQ ID NO: 53 - DNA, 16 bp, Artificial sequence
  Synthetic oligonucleotide
gcttttggaccgtttg

SEQ ID NO: 54 - DNA, 16 bp, Artificial sequence
  Synthetic oligonucleotide
atattgagctctcggg

SEQ ID NO: 55 - DNA, 16 bp, Artificial sequence
  Synthetic oligonucleotide
aagttgtgatctaaat

SEQ ID NO: 56 - DNA, 16 bp, Artificial sequence
  Synthetic oligonucleotide
aggtatacttgctgtc

SEQ ID NO: 57 - DNA, 16 bp, Artificial sequence
  Synthetic oligonucleotide
tccgggaaaagagtga

SEQ ID NO: 58 - DNA, 16 bp, Artificial sequence
  Synthetic oligonucleotide
ctccaataagtgtaga

SEQ ID NO: 59 - DNA, 16 bp, Artificial sequence
  Synthetic oligonucleotide
agaagatagctggtag

SEQ ID NO: 60 - DNA, 16 bp, Artificial sequence
  Synthetic oligonucleotide
atcaaacacaacctcg

SEQ ID NO: 61 - DNA, 16 bp, Artificial sequence
  Synthetic oligonucleotide
aaggccgaaggaagca

SEQ ID NO: 62 - DNA, 16 bp, Artificial sequence
  Synthetic oligonucleotide
gactcgaattctgtca

SEQ ID NO: 63 - DNA, 16 bp, Artificial sequence
  Synthetic oligonucleotide
aagttaacaatgccag

SEQ ID NO: 64 - DNA, 16 bp, Artificial sequence
  Synthetic oligonucleotide
ggtctaaaacccacag

SEQ ID NO: 65 - DNA, 16 bp, Artificial sequence
  Synthetic oligonucleotide
ttctttaacttccgtc

SEQ ID NO: 66 - DNA, 16 bp, Artificial sequence
  Synthetic oligonucleotide
gagaacttccgataca

SEQ ID NO: 67 - DNA, 16 bp, Artificial sequence
  Synthetic oligonucleotide
gagcaagtctgactga

SEQ ID NO: 68 - DNA, 16 bp, Artificial sequence
  Synthetic oligonucleotide
ttaagtaatgctccac

SEQ ID NO: 69 - DNA, 16 bp, Artificial sequence
  Synthetic oligonucleotide
atgcattcggatctcg

SEQ ID NO: 70 - DNA, 16 bp, Artificial sequence
  Synthetic oligonucleotide
acctttacccaatcag

SEQ ID NO: 71 - DNA, 16 bp, Artificial sequence
  Synthetic oligonucleotide
gagtgaaagcggctca

SEQ ID NO: 72 - DNA, 16 bp, Artificial sequence
  Synthetic oligonucleotide
gtgataatgttcactg

SEQ ID NO: 73 - DNA, 16 bp, Artificial sequence
  Synthetic oligonucleotide
tagcgaccttggccag

SEQ ID NO: 74 - DNA, 16 bp, Artificial sequence
  Synthetic oligonucleotide
atattgatcctgttct

SEQ ID NO: 75 - DNA, 16 bp, Artificial sequence
  Synthetic oligonucleotide
ttatgtaggagctctt

SEQ ID NO: 76 - DNA, 16 bp, Artificial sequence
  Synthetic oligonucleotide
attgtcgcttcttctg

SEQ ID NO: 77 - DNA, 16 bp, Artificial sequence
  Synthetic oligonucleotide
tccacaatcccaattg

SEQ ID NO: 78 - DNA, 16 bp, Artificial sequence
  Synthetic oligonucleotide
atatattgtctgcagc

SEQ ID NO: 79 - DNA, 16 bp, Artificial sequence
  Synthetic oligonucleotide
tagcataggcaatggc

SEQ ID NO: 80 - DNA, 16 bp, Artificial sequence
  Synthetic oligonucleotide
ggataatgggtgacaa

SEQ ID NO: 81 - DNA, 16 bp, Artificial sequence
  Synthetic oligonucleotide
actgaccaagaatccc

SEQ ID NO: 82 - DNA, 16 bp, Artificial sequence
  Synthetic oligonucleotide
atccataactccttgc

SEQ ID NO: 83 - DNA, 16 bp, Artificial sequence
  Synthetic oligonucleotide
gttactggagagttat

SEQ ID NO: 84 - DNA, 16 bp, Artificial sequence
  Synthetic oligonucleotide
agtctattcaagagtg

SEQ ID NO: 85 - DNA, 16 bp, Artificial sequence
  Synthetic oligonucleotide
gccaattatctgaact

SEQ ID NO: 86 - DNA, 16 bp, Artificial sequence
  Synthetic oligonucleotide
gttcaatggatagatt

SEQ ID NO: 87 - DNA, 16 bp, Artificial sequence
  Synthetic oligonucleotide
taatcctatgacaata

SEQ ID NO: 88 - DNA, 16 bp, Artificial sequence
  Synthetic oligonucleotide
cgatataatggtgtgc

SEQ ID NO: 89 - DNA, 16 bp, Artificial sequence
  Synthetic oligonucleotide
ctcaataaagaatccc

SEQ ID NO: 90 - DNA, 16 bp, Artificial sequence
  Synthetic oligonucleotide
tccaattaactttgga

SEQ ID NO: 91 - DNA, 16 bp, Artificial sequence
  Synthetic oligonucleotide
taccatttctagcaag

SEQ ID NO: 92 - DNA, 16 bp, Artificial sequence
  Synthetic oligonucleotide
gatagtaagactgatt

SEQ ID NO: 93 - DNA, 16 bp, Artificial sequence
  Synthetic oligonucleotide
catactaacttaccat

SEQ ID NO: 94 - DNA, 16 bp, Artificial sequence
  Synthetic oligonucleotide
atcaataaacctactg

SEQ ID NO: 95 - DNA, 16 bp, Artificial sequence
  Synthetic oligonucleotide
atgcgatacctagcac

SEQ ID NO: 96 - DNA, 16 bp, Artificial sequence
  Synthetic oligonucleotide
atctataaaacccgta

SEQ ID NO: 97 - DNA, 16 bp, Artificial sequence
  Synthetic oligonucleotide
atgtaacatgcctctc

SEQ ID NO: 98 - DNA, 16 bp, Artificial sequence
  Synthetic oligonucleotide
gtatattgatgtaggt

SEQ ID NO: 99 - DNA, 16 bp, Artificial sequence
  Synthetic oligonucleotide
tatagtaaattaggtt

SEQ ID NO: 100 - DNA, 16 bp, Artificial sequence
  Synthetic oligonucleotide
gttaatcactcttgta

SEQ ID NO: 101 - DNA, 16 bp, Artificial sequence
  Synthetic oligonucleotide
gtttatcaagaggtta

SEQ ID NO: 102 - DNA, 16 bp, Artificial sequence
  Synthetic oligonucleotide
cttagtaaaaggcccc

SEQ ID NO: 103 - DNA, 16 bp, Artificial sequence
  Synthetic oligonucleotide
gataatgtaagagccc

SEQ ID NO: 104 - DNA, 16 bp, Artificial sequence
  Synthetic oligonucleotide
ataattatggaggtct

SEQ ID NO: 105 - DNA, 16 bp, Artificial sequence
  Synthetic oligonucleotide
ggactaaatgtatcat

SEQ ID NO: 106 - DNA, 16 bp, Artificial sequence
  Synthetic oligonucleotide
gtaattactaaccaca

SEQ ID NO: 107 - DNA, 16 bp, Artificial sequence
  Synthetic oligonucleotide
gttatatagagctcta

SEQ ID NO: 108 - DNA, 16 bp, Artificial sequence
  Synthetic oligonucleotide
taaattactgggaggc

SEQ ID NO: 109 - DNA, 16 bp, Artificial sequence
  Synthetic oligonucleotide
gtcgggttgattactt

SEQ ID NO: 110 - DNA, 16 bp, Artificial sequence
  Synthetic oligonucleotide
tatagtaactactctg

SEQ ID NO: 111 - DNA, 16 bp, Artificial sequence
  Synthetic oligonucleotide
gcattatatactacca

SEQ ID NO: 112 - DNA, 16 bp, Artificial sequence
  Synthetic oligonucleotide
acataaaatctatcgg

SEQ ID NO: 113 - DNA, 16 bp, Artificial sequence
  Synthetic oligonucleotide
tacaataatgagctcg

SEQ ID NO: 114 - DNA, 16 bp, Artificial sequence
  Synthetic oligonucleotide
aatatgcagggacaca

SEQ ID NO: 115 - DNA, 16 bp, Artificial sequence
  Synthetic oligonucleotide
tggcatactcagtaag

SEQ ID NO: 116 - DNA, 16 bp, Artificial sequence
  Synthetic oligonucleotide
tatattagtagctgta

SEQ ID NO: 117 - DNA, 16 bp, Artificial sequence
  Synthetic oligonucleotide
acatttaagcttagca

SEQ ID NO: 118 - DNA, 16 bp, Artificial sequence
  Synthetic oligonucleotide
gtggtattaacatcca

SEQ ID NO: 119 - DNA, 16 bp, Artificial sequence
  Synthetic oligonucleotide
agtagaggcaatgatt

SEQ ID NO: 120 - DNA, 16 bp, Artificial sequence
  Synthetic oligonucleotide
attgttaagtagaggc

SEQ ID NO: 121 - DNA, 16 bp, Artificial sequence
  Synthetic oligonucleotide
gaaattatgcaagggt

SEQ ID NO: 122 - DNA, 16 bp, Artificial sequence
  Synthetic oligonucleotide
tccaataactagcggc

SEQ ID NO: 123 - DNA, 16 bp, Artificial sequence
  Synthetic oligonucleotide
gtaaatttgtcaggga

SEQ ID NO: 124 - DNA, 16 bp, Artificial sequence
  Synthetic oligonucleotide
gtaattatgtactcct

SEQ ID NO: 125 - DNA, 16 bp, Artificial sequence
  Synthetic oligonucleotide
gcagcgaggccgcccg

SEQ ID NO: 126 - DNA, 16 bp, Artificial sequence
  Synthetic oligonucleotide
tggtcggctgcacctg

SEQ ID NO: 127 - DNA, 16 bp, Artificial sequence
  Synthetic oligonucleotide
cagaatcgcagcagaa

SEQ ID NO: 128 - DNA, 16 bp, Artificial sequence
  Synthetic oligonucleotide
ctgtctggactctact

SEQ ID NO: 129 - DNA, 16 bp, Artificial sequence
  Synthetic oligonucleotide
gatgatccaaactgac

SEQ ID NO: 130 - DNA, 16 bp, Artificial sequence
  Synthetic oligonucleotide
attgtaattctagcgg

SEQ ID NO: 131 - DNA, 16 bp, Artificial sequence
  Synthetic oligonucleotide
aatattgagctctcgg

SEQ ID NO: 132 - DNA, 16 bp, Artificial sequence
  Synthetic oligonucleotide
ataaagttgtgatcta

SEQ ID NO: 133 - DNA, 16 bp, Artificial sequence
  Synthetic oligonucleotide
gagtaggtatacttgc

SEQ ID NO: 134 - DNA, 16 bp, Artificial sequence
  Synthetic oligonucleotide
agtcaatttccgggaa

SEQ ID NO: 135 - DNA, 16 bp, Artificial sequence
  Synthetic oligonucleotide
cagcatcatccagctt

SEQ ID NO: 136 - DNA, 16 bp, Artificial sequence
  Synthetic oligonucleotide
acagaagatagctggt

SEQ ID NO: 137 - DNA, 16 bp, Artificial sequence
  Synthetic oligonucleotide
aacgagaagcagagtc

SEQ ID NO: 138 - DNA, 16 bp, Artificial sequence
  Synthetic oligonucleotide
tgctcggacaaggccg

SEQ ID NO: 139 - DNA, 16 bp, Artificial sequence
  Synthetic oligonucleotide
cgactcgaattctgtc

SEQ ID NO: 140 - DNA, 16 bp, Artificial sequence
  Synthetic oligonucleotide
ttatgatggcagccaa

SEQ ID NO: 141 - DNA, 16 bp, Artificial sequence
  Synthetic oligonucleotide
aagttttagtgtggtc

SEQ ID NO: 142 - DNA, 16 bp, Artificial sequence
  Synthetic oligonucleotide
taatttaaggagtggc

SEQ ID NO: 143 - DNA, 16 bp, Artificial sequence
  Synthetic oligonucleotide
atgtcgggcaatttac

SEQ ID NO: 144 - DNA, 16 bp, Artificial sequence
  Synthetic oligonucleotide
taaaataacggtccgg

SEQ ID NO: 145 - DNA, 16 bp, Artificial sequence
  Synthetic oligonucleotide
tctttaagtaatgctc

SEQ ID NO: 146 - DNA, 16 bp, Artificial sequence
  Synthetic oligonucleotide
tcacatattgtgcaga

SEQ ID NO: 147 - DNA, 16 bp, Artificial sequence
  Synthetic oligonucleotide
aacctttacccaatca

SEQ ID NO: 148 - DNA, 16 bp, Artificial sequence
  Synthetic oligonucleotide
ggactagctgctcccg

SEQ ID NO: 149 - DNA, 16 bp, Artificial sequence
  Synthetic oligonucleotide
gagtgataatgttcac

SEQ ID NO: 150 - DNA, 16 bp, Artificial sequence
  Synthetic oligonucleotide
gcagtaatctccttgc

SEQ ID NO: 151 - DNA, 16 bp, Artificial sequence
  Synthetic oligonucleotide
catattgatcctgttc

SEQ ID NO: 152 - DNA, 16 bp, Artificial sequence
  Synthetic oligonucleotide
ggtaatcaatgcaact

SEQ ID NO: 153 - DNA, 16 bp, Artificial sequence
  Synthetic oligonucleotide
caattgtcgcttcttc

SEQ ID NO: 154 - DNA, 16 bp, Artificial sequence
  Synthetic oligonucleotide
ctgcagcacccatcct

SEQ ID NO: 155 - DNA, 16 bp, Artificial sequence
  Synthetic oligonucleotide
agataaccaaggactg

SEQ ID NO: 156 - DNA, 16 bp, Artificial sequence
  Synthetic oligonucleotide
gtagcataggcaatgg

SEQ ID NO: 157 - DNA, 16 bp, Artificial sequence
  Synthetic oligonucleotide
cggataatgggtgaca

SEQ ID NO: 158 - DNA, 16 bp, Artificial sequence
  Synthetic oligonucleotide
tctagttatttggtaa

SEQ ID NO: 159 - DNA, 16 bp, Artificial sequence
  Synthetic oligonucleotide
ctagtttagccacatt

SEQ ID NO: 160 - DNA, 16 bp, Artificial sequence
  Synthetic oligonucleotide
gctgttactggagagt

SEQ ID NO: 161 - DNA, 16 bp, Artificial sequence
  Synthetic oligonucleotide
ttatatcaccctccaa

SEQ ID NO: 162 - DNA, 16 bp, Artificial sequence
  Synthetic oligonucleotide
ccagattcacccagtt

SEQ ID NO: 163 - DNA, 16 bp, Artificial sequence
  Synthetic oligonucleotide
ggataaactggttgca

SEQ ID NO: 164 - DNA, 16 bp, Artificial sequence
  Synthetic oligonucleotide
cttaatcctatgacaa

SEQ ID NO: 165 - DNA, 16 bp, Artificial sequence
  Synthetic oligonucleotide
aatacgatataatggt

SEQ ID NO: 166 - DNA, 16 bp, Artificial sequence
  Synthetic oligonucleotide
agcaataatgtatacg

SEQ ID NO: 167 - DNA, 16 bp, Artificial sequence
  Synthetic oligonucleotide
cctgtatagaagccta

SEQ ID NO: 168 - DNA, 16 bp, Artificial sequence
  Synthetic oligonucleotide
attaccatttctagca

SEQ ID NO: 169 - DNA, 16 bp, Artificial sequence
  Synthetic oligonucleotide
aactataacagagtca

SEQ ID NO: 170 - DNA, 16 bp, Artificial sequence
  Synthetic oligonucleotide
cttactaattacttcc

SEQ ID NO: 171 - DNA, 16 bp, Artificial sequence
  Synthetic oligonucleotide
ggagataagcaagccc

SEQ ID NO: 172 - DNA, 16 bp, Artificial sequence
  Synthetic oligonucleotide
agttatattgatgtgt

SEQ ID NO: 173 - DNA, 16 bp, Artificial sequence
  Synthetic oligonucleotide
agtctatactaggtaa

SEQ ID NO: 174 - DNA, 16 bp, Artificial sequence
  Synthetic oligonucleotide
ggtaataaaccttgca

SEQ ID NO: 175 - DNA, 16 bp, Artificial sequence
  Synthetic oligonucleotide
tatattaccatgcatg

SEQ ID NO: 176 - DNA, 16 bp, Artificial sequence
  Synthetic oligonucleotide
gatactaatgagccat

SEQ ID NO: 177 - DNA, 16 bp, Artificial sequence
  Synthetic oligonucleotide
tcaatataatggaggg

SEQ ID NO: 178 - DNA, 16 bp, Artificial sequence
  Synthetic oligonucleotide
agtaatcaccttaaga

SEQ ID NO: 179 - DNA, 16 bp, Artificial sequence
  Synthetic oligonucleotide
aacaattaggcagtga

SEQ ID NO: 180 - DNA, 16 bp, Artificial sequence
  Synthetic oligonucleotide
tatattatggctccat

SEQ ID NO: 181 - DNA, 16 bp, Artificial sequence
  Synthetic oligonucleotide
acatataagacagcct

SEQ ID NO: 182 - DNA, 16 bp, Artificial sequence
  Synthetic oligonucleotide
gattttaccaacggct

SEQ ID NO: 183 - DNA, 16 bp, Artificial sequence
  Synthetic oligonucleotide
agcaataatatgttag

SEQ ID NO: 184 - DNA, 16 bp, Artificial sequence
  Synthetic oligonucleotide
tacaattagttgatct

SEQ ID NO: 185 - DNA, 16 bp, Artificial sequence
  Synthetic oligonucleotide
ttaattatggtcctga

SEQ ID NO: 186 - DNA, 16 bp, Artificial sequence
  Synthetic oligonucleotide
cttagtaattagagta

SEQ ID NO: 187 - DNA, 16 bp, Artificial sequence
  Synthetic oligonucleotide
aataatctagatgcct

SEQ ID NO: 188 - DNA, 16 bp, Artificial sequence
  Synthetic oligonucleotide
cttaggttgctatggt

SEQ ID NO: 189 - DNA, 16 bp, Artificial sequence
  Synthetic oligonucleotide
agaatatatgaccccc

SEQ ID NO: 190 - DNA, 16 bp, Artificial sequence
  Synthetic oligonucleotide
gtaagtaagtctgaca

SEQ ID NO: 191 - DNA, 16 bp, Artificial sequence
  Synthetic oligonucleotide
gaatatgcagggacac

SEQ ID NO: 192 - DNA, 16 bp, Artificial sequence
  Synthetic oligonucleotide
ttggcatactcagtaa

SEQ ID NO: 193 - DNA, 16 bp, Artificial sequence
  Synthetic oligonucleotide
aagtataacatgtctg

SEQ ID NO: 194 - DNA, 16 bp, Artificial sequence
  Synthetic oligonucleotide
aattttataacgagct

SEQ ID NO: 195 - DNA, 16 bp, Artificial sequence
  Synthetic oligonucleotide
agtggtattaacatcc

SEQ ID NO: 196 - DNA, 16 bp, Artificial sequence
  Synthetic oligonucleotide
gttaagtagaggcaat

SEQ ID NO: 197 - DNA, 16 bp, Artificial sequence
  Synthetic oligonucleotide
aattgttaagtagagg

SEQ ID NO: 198 - DNA, 16 bp, Artificial sequence
  Synthetic oligonucleotide
agatttaaaacacgga

SEQ ID NO: 199 - DNA, 16 bp, Artificial sequence
  Synthetic oligonucleotide
attaggtaatactcag

SEQ ID NO: 200 - DNA, 16 bp, Artificial sequence
  Synthetic oligonucleotide
tgagaattagttgcag

SEQ ID NO: 201 - DNA, 16 bp, Artificial sequence
  Synthetic oligonucleotide
tcattatatgctggtc

SEQ ID NO: 202 - DNA, 16 bp, Artificial sequence
  Synthetic oligonucleotide
atcggctcaaaaccgc

SEQ ID NO: 203 - DNA, 16 bp, Artificial sequence
  Synthetic oligonucleotide
tctttttaacaggccc

SEQ ID NO: 204 - DNA, 16 bp, Artificial sequence
  Synthetic oligonucleotide
gcagaatcgcagcaga

SEQ ID NO: 205 - DNA, 16 bp, Artificial sequence
  Synthetic oligonucleotide
cgtgtagaagactgat

SEQ ID NO: 206 - DNA, 16 bp, Artificial sequence
  Synthetic oligonucleotide
gtatttgatgatccaa

SEQ ID NO: 207 - DNA, 16 bp, Artificial sequence
  Synthetic oligonucleotide
agctctcgggctgcaa

SEQ ID NO: 208 - DNA, 16 bp, Artificial sequence
  Synthetic oligonucleotide
aaatattgagctctcg

SEQ ID NO: 209 - DNA, 16 bp, Artificial sequence
  Synthetic oligonucleotide
cataaagttgtgatct

SEQ ID NO: 210 - DNA, 16 bp, Artificial sequence
  Synthetic oligonucleotide
tgaacaaacagtctgt

SEQ ID NO: 211 - DNA, 16 bp, Artificial sequence
  Synthetic oligonucleotide
ccaataagtgtagatt

SEQ ID NO: 212 - DNA, 16 bp, Artificial sequence
  Synthetic oligonucleotide
gtagaagtatcagtca

SEQ ID NO: 213 - DNA, 16 bp, Artificial sequence
  Synthetic oligonucleotide
cacaacctcgcctgtg

SEQ ID NO: 214 - DNA, 16 bp, Artificial sequence
  Synthetic oligonucleotide
tctgaacgagaagcag

SEQ ID NO: 215 - DNA, 16 bp, Artificial sequence
  Synthetic oligonucleotide
ctcgaattctgtcatc

SEQ ID NO: 216 - DNA, 16 bp, Artificial sequence
  Synthetic oligonucleotide
atccatcctttcgact

SEQ ID NO: 217 - DNA, 16 bp, Artificial sequence
  Synthetic oligonucleotide
cttgatagctgtttaa

SEQ ID NO: 218 - DNA, 16 bp, Artificial sequence
  Synthetic oligonucleotide
tttaacttccgtctcc

SEQ ID NO: 219 - DNA, 16 bp, Artificial sequence
  Synthetic oligonucleotide
gccgggcatttatttc

SEQ ID NO: 220 - DNA, 16 bp, Artificial sequence
  Synthetic oligonucleotide
tatgtcgggcaattta

SEQ ID NO: 221 - DNA, 16 bp, Artificial sequence
  Synthetic oligonucleotide
ttctaaaataacggtc

SEQ ID NO: 222 - DNA, 16 bp, Artificial sequence
  Synthetic oligonucleotide
gtcaataacaccttga

SEQ ID NO: 223 - DNA, 16 bp, Artificial sequence
  Synthetic oligonucleotide
tatacaagatacagca

SEQ ID NO: 224 - DNA, 16 bp, Artificial sequence
  Synthetic oligonucleotide
agcggctcacagcttt

SEQ ID NO: 225 - DNA, 16 bp, Artificial sequence
  Synthetic oligonucleotide
aaggactagctgctcc

SEQ ID NO: 226 - DNA, 16 bp, Artificial sequence
  Synthetic oligonucleotide
gctttacacaaggagt

SEQ ID NO: 227 - DNA, 16 bp, Artificial sequence
  Synthetic oligonucleotide
atcaatcacagggtgc

SEQ ID NO: 228 - DNA, 16 bp, Artificial sequence
  Synthetic oligonucleotide
acatattgatcctgtt

SEQ ID NO: 229 - DNA, 16 bp, Artificial sequence
  Synthetic oligonucleotide
agccaatctgagccat

SEQ ID NO: 230 - DNA, 16 bp, Artificial sequence
  Synthetic oligonucleotide
caatcccaattgtcgc

SEQ ID NO: 231 - DNA, 16 bp, Artificial sequence
  Synthetic oligonucleotide
atattgtctgcagcac

SEQ ID NO: 232 - DNA, 16 bp, Artificial sequence
  Synthetic oligonucleotide
aagataaccaaggact

SEQ ID NO: 233 - DNA, 16 bp, Artificial sequence
  Synthetic oligonucleotide
agggttaaggatttca

SEQ ID NO: 234 - DNA, 16 bp, Artificial sequence
  Synthetic oligonucleotide
gcggataatgggtgac

SEQ ID NO: 235 - DNA, 16 bp, Artificial sequence
  Synthetic oligonucleotide
ctctagttatttggta

SEQ ID NO: 236 - DNA, 16 bp, Artificial sequence
  Synthetic oligonucleotide
cttttgacttgtgagc

SEQ ID NO: 237 - DNA, 16 bp, Artificial sequence
  Synthetic oligonucleotide
agataggctgttactg

SEQ ID NO: 238 - DNA, 16 bp, Artificial sequence
  Synthetic oligonucleotide
tttatatcaccctcca

SEQ ID NO: 239 - DNA, 16 bp, Artificial sequence
  Synthetic oligonucleotide
gatagattcctgccag

SEQ ID NO: 240 - DNA, 16 bp, Artificial sequence
  Synthetic oligonucleotide
tggataaactggttgc

SEQ ID NO: 241 - DNA, 16 bp, Artificial sequence
  Synthetic oligonucleotide
ctgcttaatcctatga

SEQ ID NO: 242 - DNA, 16 bp, Artificial sequence
  Synthetic oligonucleotide
attaggtagcatatgg

SEQ ID NO: 243 - DNA, 16 bp, Artificial sequence
  Synthetic oligonucleotide
agcaataagaagacgg

SEQ ID NO: 244 - DNA, 16 bp, Artificial sequence
  Synthetic oligonucleotide
gttaatagtttggagc

SEQ ID NO: 245 - DNA, 16 bp, Artificial sequence
  Synthetic oligonucleotide
acaatatagaagccta

SEQ ID NO: 246 - DNA, 16 bp, Artificial sequence
  Synthetic oligonucleotide
cttaggttaaggtctt

SEQ ID NO: 247 - DNA, 16 bp, Artificial sequence
  Synthetic oligonucleotide
ctcgggtttcaacgga

SEQ ID NO: 248 - DNA, 16 bp, Artificial sequence
  Synthetic oligonucleotide
attagtaagaagtctc

SEQ ID NO: 249 - DNA, 16 bp, Artificial sequence
  Synthetic oligonucleotide
atcgctaatgtgggtc

SEQ ID NO: 250 - DNA, 16 bp, Artificial sequence
  Synthetic oligonucleotide
gtaacatgcctctctg

SEQ ID NO: 251 - DNA, 16 bp, Artificial sequence
  Synthetic oligonucleotide
acctataaagtagtgc

SEQ ID NO: 252 - DNA, 16 bp, Artificial sequence
  Synthetic oligonucleotide
agtatatagatgccac

SEQ ID NO: 253 - DNA, 16 bp, Artificial sequence
  Synthetic oligonucleotide
tcatccttgcacccta

SEQ ID NO: 254 - DNA, 16 bp, Artificial sequence
  Synthetic oligonucleotide
ggagaacgcacatcaa

SEQ ID NO: 255 - DNA, 16 bp, Artificial sequence
  Synthetic oligonucleotide
gataacatagctttgt

SEQ ID NO: 256 - DNA, 16 bp, Artificial sequence
  Synthetic oligonucleotide
aggtataactattcag

SEQ ID NO: 257 - DNA, 16 bp, Artificial sequence
  Synthetic oligonucleotide
attataccttgaccag

SEQ ID NO: 258 - DNA, 16 bp, Artificial sequence
  Synthetic oligonucleotide
gataacaatttgtgct

SEQ ID NO: 259 - DNA, 16 bp, Artificial sequence
  Synthetic oligonucleotide
catactaactaccacc

SEQ ID NO: 260 - DNA, 16 bp, Artificial sequence
  Synthetic oligonucleotide
gtactatatctgtcct

SEQ ID NO: 261 - DNA, 16 bp, Artificial sequence
  Synthetic oligonucleotide
gtattattgcaaccaa

SEQ ID NO: 262 - DNA, 16 bp, Artificial sequence
  Synthetic oligonucleotide
tattttatggtgggtc

SEQ ID NO: 263 - DNA, 16 bp, Artificial sequence
  Synthetic oligonucleotide
cataacaatcaatgct

SEQ ID NO: 264 - DNA, 16 bp, Artificial sequence
  Synthetic oligonucleotide
attaggttcaataggc

SEQ ID NO: 265 - DNA, 16 bp, Artificial sequence
  Synthetic oligonucleotide
cactataataagttca

SEQ ID NO: 266 - DNA, 16 bp, Artificial sequence
  Synthetic oligonucleotide
tctgataaaggaacgc

SEQ ID NO: 267 - DNA, 16 bp, Artificial sequence
  Synthetic oligonucleotide
aagtattaacttggta

SEQ ID NO: 268 - DNA, 16 bp, Artificial sequence
  Synthetic oligonucleotide
agaatatgcagggaca

SEQ ID NO: 269 - DNA, 16 bp, Artificial sequence
  Synthetic oligonucleotide
ttcttggcatactcag

SEQ ID NO: 270 - DNA, 16 bp, Artificial sequence
  Synthetic oligonucleotide
gatatattgaagtgcc

SEQ ID NO: 271 - DNA, 16 bp, Artificial sequence
  Synthetic oligonucleotide
ggtattaacatccaca

SEQ ID NO: 272 - DNA, 16 bp, Artificial sequence
  Synthetic oligonucleotide
tttcttaggtacacag

SEQ ID NO: 273 - DNA, 16 bp, Artificial sequence
  Synthetic oligonucleotide
tgttaagtagaggcaa

SEQ ID NO: 274 - DNA, 16 bp, Artificial sequence
  Synthetic oligonucleotide
attacgatatccttgt

SEQ ID NO: 275 - DNA, 16 bp, Artificial sequence
  Synthetic oligonucleotide
acagaacaagtaccat

SEQ ID NO: 276 - DNA, 16 bp, Artificial sequence
  Synthetic oligonucleotide
tgatttaaccatggtc

SEQ ID NO: 277 - DNA, 16 bp, Artificial sequence
  Synthetic oligonucleotide
gatattagtagtagcc

SEQ ID NO: 278 - DNA, 16 bp, Artificial sequence
  Synthetic oligonucleotide
tataatctagatccca

SEQ ID NO: 279 - DNA, 16 bp, Artificial sequence
  Synthetic oligonucleotide
ggaagaatcggctcaa

SEQ ID NO: 280 - DNA, 16 bp, Artificial sequence
  Synthetic oligonucleotide
gaaacattcctggtcc

SEQ ID NO: 281 - DNA, 16 bp, Artificial sequence
  Synthetic oligonucleotide
ggactctactttgagg

SEQ ID NO: 282 - DNA, 16 bp, Artificial sequence
  Synthetic oligonucleotide
gtttcgaatcttcaga

SEQ ID NO: 283 - DNA, 16 bp, Artificial sequence
  Synthetic oligonucleotide
cttttggaccgtttgt

SEQ ID NO: 284 - DNA, 16 bp, Artificial sequence
  Synthetic oligonucleotide
attgagctctcgggct

SEQ ID NO: 285 - DNA, 16 bp, Artificial sequence
  Synthetic oligonucleotide
tgtgatctaaatggca

SEQ ID NO: 286 - DNA, 16 bp, Artificial sequence
  Synthetic oligonucleotide
gtatacttgctgtcat

SEQ ID NO: 287 - DNA, 16 bp, Artificial sequence
  Synthetic oligonucleotide
atgaacaaacagtctg

SEQ ID NO: 288 - DNA, 16 bp, Artificial sequence
  Synthetic oligonucleotide
tccaataagtgtagat

SEQ ID NO: 289 - DNA, 16 bp, Artificial sequence
  Synthetic oligonucleotide
agctggtagaagtatc

SEQ ID NO: 290 - DNA, 16 bp, Artificial sequence
  Synthetic oligonucleotide
tcaaacacaacctcgc

SEQ ID NO: 291 - DNA, 16 bp, Artificial sequence
  Synthetic oligonucleotide
tccgggtttctagctc

SEQ ID NO: 292 - DNA, 16 bp, Artificial sequence
  Synthetic oligonucleotide
actcgaattctgtcat

SEQ ID NO: 293 - DNA, 16 bp, Artificial sequence
  Synthetic oligonucleotide
ctctgtaactgcctgg

SEQ ID NO: 294 - DNA, 16 bp, Artificial sequence
  Synthetic oligonucleotide
ttttacttgatagctg

SEQ ID NO: 295 - DNA, 16 bp, Artificial sequence
  Synthetic oligonucleotide
tctttaacttccgtct

SEQ ID NO: 296 - DNA, 16 bp, Artificial sequence
  Synthetic oligonucleotide
tccgatacagcatcaa

SEQ ID NO: 297 - DNA, 16 bp, Artificial sequence
  Synthetic oligonucleotide
agaagaactcttgggt

SEQ ID NO: 298 - DNA, 16 bp, Artificial sequence
  Synthetic oligonucleotide
taagtaatgctccact

SEQ ID NO: 299 - DNA, 16 bp, Artificial sequence
  Synthetic oligonucleotide
cgtcaataacaccttg

SEQ ID NO: 300 - DNA, 16 bp, Artificial sequence
  Synthetic oligonucleotide
gtatacaagatacagc

SEQ ID NO: 301 - DNA, 16 bp, Artificial sequence
  Synthetic oligonucleotide
agtgaaagcggctcac

SEQ ID NO: 302 - DNA, 16 bp, Artificial sequence
  Synthetic oligonucleotide
agtcaaggactagctg

SEQ ID NO: 303 - DNA, 16 bp, Artificial sequence
  Synthetic oligonucleotide
gctaggtgatgcactg

SEQ ID NO: 304 - DNA, 16 bp, Artificial sequence
  Synthetic oligonucleotide
attgatcctgttctcc

SEQ ID NO: 305 - DNA, 16 bp, Artificial sequence
  Synthetic oligonucleotide
gacatattgatcctgt

SEQ ID NO: 306 - DNA, 16 bp, Artificial sequence
  Synthetic oligonucleotide
cataggagccaatctg

SEQ ID NO: 307 - DNA, 16 bp, Artificial sequence
  Synthetic oligonucleotide
ccacaatcccaattgt

SEQ ID NO: 308 - DNA, 16 bp, Artificial sequence
  Synthetic oligonucleotide
tatattgtctgcagca

SEQ ID NO: 309 - DNA, 16 bp, Artificial sequence
  Synthetic oligonucleotide
gcataggcaatggcaa

SEQ ID NO: 310 - DNA, 16 bp, Artificial sequence
  Synthetic oligonucleotide
cagggttaaggatttc

SEQ ID NO: 311 - DNA, 16 bp, Artificial sequence
  Synthetic oligonucleotide
ctggcggataatgggt

SEQ ID NO: 312 - DNA, 16 bp, Artificial sequence
  Synthetic oligonucleotide
tccataactccttgct

SEQ ID NO: 313 - DNA, 16 bp, Artificial sequence
  Synthetic oligonucleotide
aatacttgagtctctt

SEQ ID NO: 314 - DNA, 16 bp, Artificial sequence
  Synthetic oligonucleotide
cacaaagataggctgt

SEQ ID NO: 315 - DNA, 16 bp, Artificial sequence
  Synthetic oligonucleotide
ttttatatcaccctcc

SEQ ID NO: 316 - DNA, 16 bp, Artificial sequence
  Synthetic oligonucleotide
ggatagattcctgcca

SEQ ID NO: 317 - DNA, 16 bp, Artificial sequence
  Synthetic oligonucleotide
gtggataaactggttg

SEQ ID NO: 318 - DNA, 16 bp, Artificial sequence
  Synthetic oligonucleotide
gcagaattgtagctct

SEQ ID NO: 319 - DNA, 16 bp, Artificial sequence
  Synthetic oligonucleotide
gtatatttgtatcgct

SEQ ID NO: 320 - DNA, 16 bp, Artificial sequence
  Synthetic oligonucleotide
cacaataataagttcc

SEQ ID NO: 321 - DNA, 16 bp, Artificial sequence
  Synthetic oligonucleotide
gatatacacacacgga

SEQ ID NO: 322 - DNA, 16 bp, Artificial sequence
  Synthetic oligonucleotide
tacgataatgatgccc

SEQ ID NO: 323 - DNA, 16 bp, Artificial sequence
  Synthetic oligonucleotide
tctatctaacatatac

SEQ ID NO: 324 - DNA, 16 bp, Artificial sequence
  Synthetic oligonucleotide
gtaagtaaaccaggtg

SEQ ID NO: 325 - DNA, 16 bp, Artificial sequence
  Synthetic oligonucleotide
gatacctagcactcct

SEQ ID NO: 326 - DNA, 16 bp, Artificial sequence
  Synthetic oligonucleotide
gtaattaatgctggtt

SEQ ID NO: 327 - DNA, 16 bp, Artificial sequence
  Synthetic oligonucleotide
tgtaacatgcctctct

SEQ ID NO: 328 - DNA, 16 bp, Artificial sequence
  Synthetic oligonucleotide
ggatataagaattggt

SEQ ID NO: 329 - DNA, 16 bp, Artificial sequence
  Synthetic oligonucleotide
attaggttaactctca

SEQ ID NO: 330 - DNA, 16 bp, Artificial sequence
  Synthetic oligonucleotide
attactaatacccagg

SEQ ID NO: 331 - DNA, 16 bp, Artificial sequence
  Synthetic oligonucleotide
taggataaagttgctt

SEQ ID NO: 332 - DNA, 16 bp, Artificial sequence
  Synthetic oligonucleotide
attataatgttgcaca

SEQ ID NO: 333 - DNA, 16 bp, Artificial sequence
  Synthetic oligonucleotide
tacgctaaaacccaga

SEQ ID NO: 334 - DNA, 16 bp, Artificial sequence
  Synthetic oligonucleotide
agagaacattgaccac

SEQ ID NO: 335 - DNA, 16 bp, Artificial sequence
  Synthetic oligonucleotide
tatactaacttcaggc

SEQ ID NO: 336 - DNA, 16 bp, Artificial sequence
  Synthetic oligonucleotide
agttattatgggttcc

SEQ ID NO: 337 - DNA, 16 bp, Artificial sequence
  Synthetic oligonucleotide
aatacatattcgaagt

SEQ ID NO: 338 - DNA, 16 bp, Artificial sequence
  Synthetic oligonucleotide
cactattaccagctac

SEQ ID NO: 339 - DNA, 16 bp, Artificial sequence
  Synthetic oligonucleotide
tacaataaagctccct

SEQ ID NO: 340 - DNA, 16 bp, Artificial sequence
  Synthetic oligonucleotide
acaaataatacgattc

SEQ ID NO: 341 - DNA, 16 bp, Artificial sequence
  Synthetic oligonucleotide
aacaattagtaaaccc

SEQ ID NO: 342 - DNA, 16 bp, Artificial sequence
  Synthetic oligonucleotide
gcactataataagttc

SEQ ID NO: 343 - DNA, 16 bp, Artificial sequence
  Synthetic oligonucleotide
catagtaactaaagca

SEQ ID NO: 344 - DNA, 16 bp, Artificial sequence
  Synthetic oligonucleotide
gcagaattgtaactct

SEQ ID NO: 345 - DNA, 16 bp, Artificial sequence
  Synthetic oligonucleotide
aagaatatgcagggac

SEQ ID NO: 346 - DNA, 16 bp, Artificial sequence
  Synthetic oligonucleotide
gtaactaatattacca

SEQ ID NO: 347 - DNA, 16 bp, Artificial sequence
  Synthetic oligonucleotide
tatactaaagggcagt

SEQ ID NO: 348 - DNA, 16 bp, Artificial sequence
  Synthetic oligonucleotide
tggtattaacatccac

SEQ ID NO: 349 - DNA, 16 bp, Artificial sequence
  Synthetic oligonucleotide
tagcatttcttaggta

SEQ ID NO: 350 - DNA, 16 bp, Artificial sequence
  Synthetic oligonucleotide
ttgttaagtagaggca

SEQ ID NO: 351 - DNA, 16 bp, Artificial sequence
  Synthetic oligonucleotide
gatattaatttcacga

SEQ ID NO: 352 - DNA, 16 bp, Artificial sequence
  Synthetic oligonucleotide
gcatcggaaaatggtt

SEQ ID NO: 353 - DNA, 16 bp, Artificial sequence
  Synthetic oligonucleotide
cttattaggaagccga

SEQ ID NO: 354 - DNA, 16 bp, Artificial sequence
  Synthetic oligonucleotide
tgatattagtagtagc

SEQ ID NO: 355 - DNA, 16 bp, Artificial sequence
  Synthetic oligonucleotide
gcagaatagcaaccca

SEQ ID NO: 356 - DNA, 20 bp, Artificial sequence
  Synthetic oligonucleotide
aatgttatccatcctttcga

SEQ ID NO: 357 - DNA, 20 bp, Artificial sequence
  Synthetic oligonucleotide
tctgagatatgatcctcccc

SEQ ID NO: 358 - DNA, 20 bp, Artificial sequence
  Synthetic oligonucleotide
gctacagagtcccctctcta

SEQ ID NO: 359 - DNA, 20 bp, Artificial sequence
  Synthetic oligonucleotide
acctaatgttctccccatca

SEQ ID NO: 360 - DNA, 20 bp, Artificial sequence
  Synthetic oligonucleotide
gggcagtcaatttccgggaa

SEQ ID NO: 361 - DNA, 20 bp, Artificial sequence
  Synthetic oligonucleotide
atttacagcatcatccagct

SEQ ID NO: 362 - DNA, 20 bp, Artificial sequence
  Synthetic oligonucleotide
tttgacttacttcaagtgct

SEQ ID NO: 363 - DNA, 20 bp, Artificial sequence
  Synthetic oligonucleotide
gaatgtattaatccatgctc

SEQ ID NO: 364 - DNA, 20 bp, Artificial sequence
  Synthetic oligonucleotide
tagcatcaatcaataagatc

SEQ ID NO: 365 - DNA, 20 bp, Artificial sequence
  Synthetic oligonucleotide
agctttatacaccctttctc

SEQ ID NO: 366 - DNA, 20 bp, Artificial sequence
  Synthetic oligonucleotide
tgtttctaaccaccttgctt

SEQ ID NO: 367 - DNA, 20 bp, Artificial sequence
  Synthetic oligonucleotide
taacaagatccacataccat

SEQ ID NO: 368 - DNA, 20 bp, Artificial sequence
  Synthetic oligonucleotide
tcatttcatctctatcctac

SEQ ID NO: 369 - DNA, 20 bp, Artificial sequence
  Synthetic oligonucleotide
cctcagacatttctttggct

SEQ ID NO: 370 - DNA, 20 bp, Artificial sequence
  Synthetic oligonucleotide
cagatttttaaaccaagcca

SEQ ID NO: 371 - DNA, 20 bp, Artificial sequence
  Synthetic oligonucleotide
tactgtccataaaattttct

SEQ ID NO: 372 - DNA, 20 bp, Artificial sequence
  Synthetic oligonucleotide
tctagaaaatcaagccattc

SEQ ID NO: 373 - DNA, 20 bp, Artificial sequence
  Synthetic oligonucleotide
taagcttgacattacctcct

SEQ ID NO: 374 - DNA, 20 bp, Artificial sequence
  Synthetic oligonucleotide
agatctatttcctaacacaa

SEQ ID NO: 375 - DNA, 20 bp, Artificial sequence
  Synthetic oligonucleotide
gaatgacaaataatttcatc

SEQ ID NO: 376 - DNA, 20 bp, Artificial sequence
  Synthetic oligonucleotide
cagaactgcaaatctctcct

SEQ ID NO: 377 - DNA, 20 bp, Artificial sequence
  Synthetic oligonucleotide
aacttccgatacagcatcaa

SEQ ID NO: 378 - DNA, 20 bp, Artificial sequence
  Synthetic oligonucleotide
acatctataccatcctaaga

SEQ ID NO: 379 - DNA, 20 bp, Artificial sequence
  Synthetic oligonucleotide
ttaccggatacttacatctc

SEQ ID NO: 380 - DNA, 20 bp, Artificial sequence
  Synthetic oligonucleotide
atcctcactgaccaagaatc

SEQ ID NO: 381 - DNA, 20 bp, Artificial sequence
  Synthetic oligonucleotide
cttttggaccgtttgttagc

SEQ ID NO: 382 - DNA, 20 bp, Artificial sequence
  Synthetic oligonucleotide
gcaattttatcactatgcta

SEQ ID NO: 383 - DNA, 20 bp, Artificial sequence
  Synthetic oligonucleotide
acatttaatccataactcct

SEQ ID NO: 384 - DNA, 20 bp, Artificial sequence
  Synthetic oligonucleotide
gctgctacacattttccact

SEQ ID NO: 385 - DNA, 20 bp, Artificial sequence
  Synthetic oligonucleotide
accgaactgatttcatgatc

SEQ ID NO: 386 - DNA, 20 bp, Artificial sequence
  Synthetic oligonucleotide
ttcaaactaatctttaggta

SEQ ID NO: 387 - DNA, 20 bp, Artificial sequence
  Synthetic oligonucleotide
gtatattgatgtaggtatat

SEQ ID NO: 388 - DNA, 20 bp, Artificial sequence
  Synthetic oligonucleotide
tactttctatctatcaagct

SEQ ID NO: 389 - DNA, 20 bp, Artificial sequence
  Synthetic oligonucleotide
tagcatccaaaatatgagct

SEQ ID NO: 390 - DNA, 20 bp, Artificial sequence
  Synthetic oligonucleotide
acaatcccaattgtcgcttc

SEQ ID NO: 391 - DNA, 20 bp, Artificial sequence
  Synthetic oligonucleotide
tatttgggacatattgatcc

SEQ ID NO: 392 - DNA, 20 bp, Artificial sequence
  Synthetic oligonucleotide
accacaggacattcttccac

SEQ ID NO: 393 - DNA, 20 bp, Artificial sequence
  Synthetic oligonucleotide
ccacaataatatatgagggt

SEQ ID NO: 394 - DNA, 20 bp, Artificial sequence
  Synthetic oligonucleotide
ctgcatcttccccaaagaat

SEQ ID NO: 395 - DNA, 20 bp, Artificial sequence
  Synthetic oligonucleotide
aaggagtatatttccttgcc

SEQ ID NO: 396 - DNA, 20 bp, Artificial sequence
  Synthetic oligonucleotide
tctgaaatatacttccttcc

SEQ ID NO: 397 - DNA, 20 bp, Artificial sequence
  Synthetic oligonucleotide
atccacccaaactgtatttc

SEQ ID NO: 398 - DNA, 20 bp, Artificial sequence
  Synthetic oligonucleotide
aggtactcaacctataaagt

SEQ ID NO: 399 - DNA, 20 bp, Artificial sequence
  Synthetic oligonucleotide
gaccttattccttctgtgct

SEQ ID NO: 400 - DNA, 20 bp, Artificial sequence
  Synthetic oligonucleotide
ctggaaactatcaaacacaa

SEQ ID NO: 401 - DNA, 20 bp, Artificial sequence
  Synthetic oligonucleotide
acagcttttctttaactgat

SEQ ID NO: 402 - DNA, 20 bp, Artificial sequence
  Synthetic oligonucleotide
gggtcacccacttctttaac

SEQ ID NO: 403 - DNA, 20 bp, Artificial sequence
  Synthetic oligonucleotide
tgcataacctttgcctatct

SEQ ID NO: 404 - DNA, 20 bp, Artificial sequence
  Synthetic oligonucleotide
aatttttatatcaccctcca

SEQ ID NO: 405 - DNA, 20 bp, Artificial sequence
  Synthetic oligonucleotide
gtaccattttcatctcatgt

SEQ ID NO: 406 - DNA, 20 bp, Artificial sequence
  Synthetic oligonucleotide
tcatgttcatattttggtca

SEQ ID NO: 407 - DNA, 20 bp, Artificial sequence
  Synthetic oligonucleotide
atgtttcaatttactaggca

SEQ ID NO: 408 - DNA, 20 bp, Artificial sequence
  Synthetic oligonucleotide
ttgcttttatcattctgtac

SEQ ID NO: 409 - DNA, 20 bp, Artificial sequence
  Synthetic oligonucleotide
catgttgaactcctctgtcc

SEQ ID NO: 410 - DNA, 20 bp, Artificial sequence
  Synthetic oligonucleotide
gcacctaatatatctccatt

SEQ ID NO: 411 - DNA, 20 bp, Artificial sequence
  Synthetic oligonucleotide
actcttcgaccaccaaggaa

SEQ ID NO: 412 - DNA, 20 bp, Artificial sequence
  Synthetic oligonucleotide
accttgaatttcatccttcc

SEQ ID NO: 413 - DNA, 20 bp, Artificial sequence
  Synthetic oligonucleotide
aagtcatcatctcagtgaaa

SEQ ID NO: 414 - DNA, 20 bp, Artificial sequence
  Synthetic oligonucleotide
atccaagataaccaaggact

SEQ ID NO: 415 - DNA, 20 bp, Artificial sequence
  Synthetic oligonucleotide
ttggagagcatcttttccaa

SEQ ID NO: 416 - DNA, 20 bp, Artificial sequence
  Synthetic oligonucleotide
ctgaagaatcttcttgccta

SEQ ID NO: 417 - DNA, 20 bp, Artificial sequence
  Synthetic oligonucleotide
gcatttctaaatcctgccaa

SEQ ID NO: 418 - DNA, 20 bp, Artificial sequence
  Synthetic oligonucleotide
atatcagtctaagaaagacc

SEQ ID NO: 419 - DNA, 20 bp, Artificial sequence
  Synthetic oligonucleotide
cctgtagttatttcatacta

SEQ ID NO: 420 - DNA, 20 bp, Artificial sequence
  Synthetic oligonucleotide
caagtctttacttcccatcc

SEQ ID NO: 421 - DNA, 20 bp, Artificial sequence
  Synthetic oligonucleotide
aggtacacttcatcagatat

SEQ ID NO: 422 - DNA, 20 bp, Artificial sequence
  Synthetic oligonucleotide
acaggcccatcattttccaa

SEQ ID NO: 423 - DNA, 20 bp, Artificial sequence
  Synthetic oligonucleotide
gggcagctttcttctagtca

SEQ ID NO: 424 - DNA, 20 bp, Artificial sequence
  Synthetic oligonucleotide
ccttcatcatacctactaca

SEQ ID NO: 425 - DNA, 20 bp, Artificial sequence
  Synthetic oligonucleotide
ctcatattaccatttctagc

SEQ ID NO: 426 - DNA, 20 bp, Artificial sequence
  Synthetic oligonucleotide
tattgcttgaaattctgact

SEQ ID NO: 427 - DNA, 20 bp, Artificial sequence
  Synthetic oligonucleotide
ttgcttagcgaccttggcca

SEQ ID NO: 428 - DNA, 20 bp, Artificial sequence
  Synthetic oligonucleotide
cggtaattatcattactctc

SEQ ID NO: 429 - DNA, 20 bp, Artificial sequence
  Synthetic oligonucleotide
tgttgttccattaattgtca

SEQ ID NO: 430 - DNA, 20 bp, Artificial sequence
  Synthetic oligonucleotide
cagcataatcactctgacct

SEQ ID NO: 431 - DNA, 20 bp, Artificial sequence
  Synthetic oligonucleotide
aagctgaccttatatccttt

SEQ ID NO: 432 - DNA, 20 bp, Artificial sequence
  Synthetic oligonucleotide
acacaatcatcctaacacat

SEQ ID NO: 433 - DNA, 20 bp, Artificial sequence
  Synthetic oligonucleotide
atgcttttggaccgtttgtt

SEQ ID NO: 434 - DNA, 20 bp, Artificial sequence
  Synthetic oligonucleotide
caggtaattaatattagcaa

SEQ ID NO: 435 - DNA, 20 bp, Artificial sequence
  Synthetic oligonucleotide
accacaaatttctcatcact

SEQ ID NO: 436 - DNA, 20 bp, Artificial sequence
  Synthetic oligonucleotide
tgcatcttccccaaagaatc

SEQ ID NO: 437 - DNA, 20 bp, Artificial sequence
  Synthetic oligonucleotide
tatcagtctaagaaagacca

SEQ ID NO: 438 - DNA, 20 bp, Artificial sequence
  Synthetic oligonucleotide
gactcagtattataatgcta

SEQ ID NO: 439 - DNA, 20 bp, Artificial sequence
  Synthetic oligonucleotide
tcacccacttctttaacttc

SEQ ID NO: 440 - DNA, 20 bp, Artificial sequence
  Synthetic oligonucleotide
aggacattcttccacatgtc

SEQ ID NO: 441 - DNA, 20 bp, Artificial sequence
  Synthetic oligonucleotide
gctttatacaccctttctct

SEQ ID NO: 442 - DNA, 20 bp, Artificial sequence
  Synthetic oligonucleotide
catctcagtgaaactttccc

SEQ ID NO: 443 - DNA, 20 bp, Artificial sequence
  Synthetic oligonucleotide
ttaagctatttctttcacta

SEQ ID NO: 444 - DNA, 20 bp, Artificial sequence
  Synthetic oligonucleotide
cctgacattatatttgcctt

SEQ ID NO: 445 - DNA, 20 bp, Artificial sequence
  Synthetic oligonucleotide
gaacatctaacatttgttcc

SEQ ID NO: 446 - DNA, 20 bp, Artificial sequence
  Synthetic oligonucleotide
gccaagaattatcttagcat

SEQ ID NO: 447 - DNA, 20 bp, Artificial sequence
  Synthetic oligonucleotide
gaaactatcaaacacaacct

SEQ ID NO: 448 - DNA, 20 bp, Artificial sequence
  Synthetic oligonucleotide
taccggatacttacatctct

SEQ ID NO: 449 - DNA, 20 bp, Artificial sequence
  Synthetic oligonucleotide
accttattccttctgtgctc

SEQ ID NO: 450 - DNA, 20 bp, Artificial sequence
  Synthetic oligonucleotide
acttgtatttgatgatccaa

SEQ ID NO: 451 - DNA, 20 bp, Artificial sequence
  Synthetic oligonucleotide
attcaacatttattccaccc

SEQ ID NO: 452 - DNA, 20 bp, Artificial sequence
  Synthetic oligonucleotide
aataattcagttttatcccc

SEQ ID NO: 453 - DNA, 20 bp, Artificial sequence
  Synthetic oligonucleotide
gccagggagaaaatgcagtc

SEQ ID NO: 454 - DNA, 20 bp, Artificial sequence
  Synthetic oligonucleotide
cagcacacagactacttgct

SEQ ID NO: 455 - DNA, 20 bp, Artificial sequence
  Synthetic oligonucleotide
gcataacctttgcctatctc

SEQ ID NO: 456 - DNA, 20 bp, Artificial sequence
  Synthetic oligonucleotide
tgtttcaatttactaggcat

SEQ ID NO: 457 - DNA, 20 bp, Artificial sequence
  Synthetic oligonucleotide
ggtactcaacctataaagta

SEQ ID NO: 458 - DNA, 20 bp, Artificial sequence
  Synthetic oligonucleotide
acccactagatttcttcact

SEQ ID NO: 459 - DNA, 20 bp, Artificial sequence
  Synthetic oligonucleotide
atgttgaactcctctgtcca

SEQ ID NO: 460 - DNA, 20 bp, Artificial sequence
  Synthetic oligonucleotide
gcagtcaatttccgggaaaa

SEQ ID NO: 461 - DNA, 20 bp, Artificial sequence
  Synthetic oligonucleotide
ctggtattcaatcctctgat

SEQ ID NO: 462 - DNA, 20 bp, Artificial sequence
  Synthetic oligonucleotide
tgtgattacatactacagct

SEQ ID NO: 463 - DNA, 20 bp, Artificial sequence
  Synthetic oligonucleotide
tgcccatcatgattttccac

SEQ ID NO: 464 - DNA, 20 bp, Artificial sequence
  Synthetic oligonucleotide
atttgggacatattgatcct

SEQ ID NO: 465 - DNA, 20 bp, Artificial sequence
  Synthetic oligonucleotide
attgcttgaaattctgactt

SEQ ID NO: 466 - DNA, 20 bp, Artificial sequence
  Synthetic oligonucleotide
catctataccatcctaagaa

SEQ ID NO: 467 - DNA, 20 bp, Artificial sequence
  Synthetic oligonucleotide
agcataatcactctgacctt

SEQ ID NO: 468 - DNA, 20 bp, Artificial sequence
  Synthetic oligonucleotide
tgcagaacactttcttggtc

SEQ ID NO: 469 - DNA, 20 bp, Artificial sequence
  Synthetic oligonucleotide
tcatattaccatttctagca

SEQ ID NO: 470 - DNA, 20 bp, Artificial sequence
  Synthetic oligonucleotide
tgctcattatatattactac

SEQ ID NO: 471 - DNA, 20 bp, Artificial sequence
  Synthetic oligonucleotide
agcttgacattacctcctgt

SEQ ID NO: 472 - DNA, 20 bp, Artificial sequence
  Synthetic oligonucleotide
gcttaacatttccttcatac

SEQ ID NO: 473 - DNA, 20 bp, Artificial sequence
  Synthetic oligonucleotide
gagagcatcttttccaagtt

SEQ ID NO: 474 - DNA, 20 bp, Artificial sequence
  Synthetic oligonucleotide
catttaatccataactcctt

SEQ ID NO: 475 - DNA, 20 bp, Artificial sequence
  Synthetic oligonucleotide
gaactgcaaatctctcctgc

SEQ ID NO: 476 - DNA, 20 bp, Artificial sequence
  Synthetic oligonucleotide
gcagtttcacatttctgtat

SEQ ID NO: 477 - DNA, 20 bp, Artificial sequence
  Synthetic oligonucleotide
tcctcactgaccaagaatcc

SEQ ID NO: 478 - DNA, 20 bp, Artificial sequence
  Synthetic oligonucleotide
caggcccatcattttccaat

SEQ ID NO: 479 - DNA, 20 bp, Artificial sequence
  Synthetic oligonucleotide
caattgtcgcttcttctgca

SEQ ID NO: 480 - DNA, 20 bp, Artificial sequence
  Synthetic oligonucleotide
tttacagcatcatccagctt

SEQ ID NO: 481 - DNA, 20 bp, Artificial sequence
  Synthetic oligonucleotide
gttgttccattaattgtcat

SEQ ID NO: 482 - DNA, 20 bp, Artificial sequence
  Synthetic oligonucleotide
ggtaattatcattactctct

SEQ ID NO: 483 - DNA, 20 bp, Artificial sequence
  Synthetic oligonucleotide
cgtcatccattatttgttct

SEQ ID NO: 484 - DNA, 20 bp, Artificial sequence
  Synthetic oligonucleotide
tcatctctatcctaccaaat

SEQ ID NO: 485 - DNA, 20 bp, Artificial sequence
  Synthetic oligonucleotide
tcttcgaccaccaaggaaaa

SEQ ID NO: 486 - DNA, 20 bp, Artificial sequence
  Synthetic oligonucleotide
atttttatatcaccctccaa

SEQ ID NO: 487 - DNA, 20 bp, Artificial sequence
  Synthetic oligonucleotide
tcagacatttctttggctct

SEQ ID NO: 488 - DNA, 20 bp, Artificial sequence
  Synthetic oligonucleotide
acaagatccacataccatca

SEQ ID NO: 489 - DNA, 20 bp, Artificial sequence
  Synthetic oligonucleotide
cagttcttccataaatgtac

SEQ ID NO: 490 - DNA, 20 bp, Artificial sequence
  Synthetic oligonucleotide
gcagctttcttctagtcacc

SEQ ID NO: 491 - DNA, 20 bp, Artificial sequence
  Synthetic oligonucleotide
gtagttatttcatactaaca

SEQ ID NO: 492 - DNA, 20 bp, Artificial sequence
  Synthetic oligonucleotide
gccaacacattttctattac

SEQ ID NO: 493 - DNA, 20 bp, Artificial sequence
  Synthetic oligonucleotide
gtactaataaatattccaca

SEQ ID NO: 494 - DNA, 20 bp, Artificial sequence
  Synthetic oligonucleotide
ccgaactgatttcatgatct

SEQ ID NO: 495 - DNA, 20 bp, Artificial sequence
  Synthetic oligonucleotide
agctgaccttatatcctttt

SEQ ID NO: 496 - DNA, 20 bp, Artificial sequence
  Synthetic oligonucleotide
ttccgatacagcatcaagcc

SEQ ID NO: 497 - DNA, 20 bp, Artificial sequence
  Synthetic oligonucleotide
gaaaatcaagccattcagca

SEQ ID NO: 498 - DNA, 20 bp, Artificial sequence
  Synthetic oligonucleotide
gacaaataatttcatccaac

SEQ ID NO: 499 - DNA, 20 bp, Artificial sequence
  Synthetic oligonucleotide
gtggaagtctattcaagagt

SEQ ID NO: 500 - DNA, 20 bp, Artificial sequence
  Synthetic oligonucleotide
atgtattacatttattcgct

SEQ ID NO: 501 - DNA, 20 bp, Artificial sequence
  Synthetic oligonucleotide
agatctttatccctatgtac

SEQ ID NO: 502 - DNA, 20 bp, Artificial sequence
  Synthetic oligonucleotide
ctggtaactactttctcagc

SEQ ID NO: 503 - DNA, 20 bp, Artificial sequence
  Synthetic oligonucleotide
gctacacattttccactgtt

SEQ ID NO: 504 - DNA, 20 bp, Artificial sequence
  Synthetic oligonucleotide
tccacccaaactgtatttca

SEQ ID NO: 505 - DNA, 20 bp, Artificial sequence
  Synthetic oligonucleotide
acatgctacctcatcactct

SEQ ID NO: 506 - DNA, 20 bp, Artificial sequence
  Synthetic oligonucleotide
atgttatccatcctttcgac

SEQ ID NO: 507 - DNA, 20 bp, Artificial sequence
  Synthetic oligonucleotide
atatgcatcaattttcaggc

SEQ ID NO: 508 - DNA, 20 bp, Artificial sequence
  Synthetic oligonucleotide
acaacttactcatttagtgc

SEQ ID NO: 509 - DNA, 20 bp, Artificial sequence
  Synthetic oligonucleotide
agcatcaatcaataagatct

SEQ ID NO: 510 - DNA, 20 bp, Artificial sequence
  Synthetic oligonucleotide
cccactagatttcttcacta

SEQ ID NO: 511 - DNA, 20 bp, Artificial sequence
  Synthetic oligonucleotide
tctcaaattttgcttggact

SEQ ID NO: 512 - DNA, 20 bp, Artificial sequence
  Synthetic oligonucleotide
agttcttccataaatgtact

SEQ ID NO: 513 - DNA, 20 bp, Artificial sequence
  Synthetic oligonucleotide
ttcaacatttattccacccc

SEQ ID NO: 514 - DNA, 20 bp, Artificial sequence
  Synthetic oligonucleotide
agtcaatttccgggaaaaga

SEQ ID NO: 515 - DNA, 20 bp, Artificial sequence
  Synthetic oligonucleotide
gctagtttttaaccaagtat

SEQ ID NO: 516 - DNA, 20 bp, Artificial sequence
  Synthetic oligonucleotide
tggtaactactttctcagca

SEQ ID NO: 517 - DNA, 20 bp, Artificial sequence
  Synthetic oligonucleotide
gcagaacactttcttggtct

SEQ ID NO: 518 - DNA, 20 bp, Artificial sequence
  Synthetic oligonucleotide
tgggtaacttatctaactac

SEQ ID NO: 519 - DNA, 20 bp, Artificial sequence
  Synthetic oligonucleotide
aaagacgcaccccttgccca

SEQ ID NO: 520 - DNA, 20 bp, Artificial sequence
  Synthetic oligonucleotide
tatatcaccctccaaaagct

SEQ ID NO: 521 - DNA, 20 bp, Artificial sequence
  Synthetic oligonucleotide
tcacctgcaaagtacttacc

SEQ ID NO: 522 - DNA, 20 bp, Artificial sequence
  Synthetic oligonucleotide
acccaaactgtatttcagac

SEQ ID NO: 523 - DNA, 20 bp, Artificial sequence
  Synthetic oligonucleotide
cagctttcttctagtcaccc

SEQ ID NO: 524 - DNA, 20 bp, Artificial sequence
  Synthetic oligonucleotide
ccggatacttacatctctga

SEQ ID NO: 525 - DNA, 20 bp, Artificial sequence
  Synthetic oligonucleotide
ttgcatccaaattcttactt

SEQ ID NO: 526 - DNA, 20 bp, Artificial sequence
  Synthetic oligonucleotide
acccacttctttaacttccg

SEQ ID NO: 527 - DNA, 20 bp, Artificial sequence
  Synthetic oligonucleotide
attcagttttatccccaact

SEQ ID NO: 528 - DNA, 20 bp, Artificial sequence
  Synthetic oligonucleotide
tttgacaatcaagaagaact

SEQ ID NO: 529 - DNA, 20 bp, Artificial sequence
  Synthetic oligonucleotide
tggacaactttttcccaaac

SEQ ID NO: 530 - DNA, 20 bp, Artificial sequence
  Synthetic oligonucleotide
cagagtcccctctctatgtc

SEQ ID NO: 531 - DNA, 20 bp, Artificial sequence
  Synthetic oligonucleotide
aatgctgattttctccacta

SEQ ID NO: 532 - DNA, 20 bp, Artificial sequence
  Synthetic oligonucleotide
gagcatcttttccaagttga

SEQ ID NO: 533 - DNA, 20 bp, Artificial sequence
  Synthetic oligonucleotide
gcaactgaatttttcatcta

SEQ ID NO: 534 - DNA, 20 bp, Artificial sequence
  Synthetic oligonucleotide
cggttaggtataattccatc

SEQ ID NO: 535 - DNA, 20 bp, Artificial sequence
  Synthetic oligonucleotide
tgttgaactcctctgtccac

SEQ ID NO: 536 - DNA, 20 bp, Artificial sequence
  Synthetic oligonucleotide
gcatcaatcaataagatctt

SEQ ID NO: 537 - DNA, 20 bp, Artificial sequence
  Synthetic oligonucleotide
agtacaaatactccacagtc

SEQ ID NO: 538 - DNA, 20 bp, Artificial sequence
  Synthetic oligonucleotide
gtttacctttacaagatctt

SEQ ID NO: 539 - DNA, 20 bp, Artificial sequence
  Synthetic oligonucleotide
acttgaaaaagactgtcttc

SEQ ID NO: 540 - DNA, 20 bp, Artificial sequence
  Synthetic oligonucleotide
gctcattatatattactaca

SEQ ID NO: 541 - DNA, 20 bp, Artificial sequence
  Synthetic oligonucleotide
actgcaaatctctcctgcag

SEQ ID NO: 542 - DNA, 20 bp, Artificial sequence
  Synthetic oligonucleotide
tacagcatcatccagcttga

SEQ ID NO: 543 - DNA, 20 bp, Artificial sequence
  Synthetic oligonucleotide
gctgtatatacttccctaat

SEQ ID NO: 544 - DNA, 20 bp, Artificial sequence
  Synthetic oligonucleotide
gcatcccttacactgttgtc

SEQ ID NO: 545 - DNA, 20 bp, Artificial sequence
  Synthetic oligonucleotide
tactcaacctataaagtagt

SEQ ID NO: 546 - DNA, 20 bp, Artificial sequence
  Synthetic oligonucleotide
gatacagcatcaagccgggc

SEQ ID NO: 547 - DNA, 20 bp, Artificial sequence
  Synthetic oligonucleotide
cctcactgaccaagaatccc

SEQ ID NO: 548 - DNA, 20 bp, Artificial sequence
  Synthetic oligonucleotide
aataatttcatccaacaatc

SEQ ID NO: 549 - DNA, 20 bp, Artificial sequence
  Synthetic oligonucleotide
gggacatattgatcctgttc

SEQ ID NO: 550 - DNA, 20 bp, Artificial sequence
  Synthetic oligonucleotide
gtaattatcattactctctc

SEQ ID NO: 551 - DNA, 20 bp, Artificial sequence
  Synthetic oligonucleotide
gcttgacattacctcctgtc

SEQ ID NO: 552 - DNA, 20 bp, Artificial sequence
  Synthetic oligonucleotide
ggccaattctttctacttat

SEQ ID NO: 553 - DNA, 20 bp, Artificial sequence
  Synthetic oligonucleotide
ctcagacatttctttggctc

SEQ ID NO: 554 - DNA, 20 bp, Artificial sequence
  Synthetic oligonucleotide
ataacatcttatacctggct

SEQ ID NO: 555 - DNA, 20 bp, Artificial sequence
  Synthetic oligonucleotide
ccaagcactctcctacttaa

SEQ ID NO: 556 - DNA, 20 bp, Artificial sequence
  Synthetic oligonucleotide
ccatcatgattttccacggt

SEQ ID NO: 557 - DNA, 20 bp, Artificial sequence
  Synthetic oligonucleotide
ttgatattaccatttctagc

SEQ ID NO: 558 - DNA, 20 bp, Artificial sequence
  Synthetic oligonucleotide
gtgattacatactacagctt

SEQ ID NO: 559 - DNA, 20 bp, Artificial sequence
  Synthetic oligonucleotide
atctcagtgaaactttcccc

SEQ ID NO: 560 - DNA, 20 bp, Artificial sequence
  Synthetic oligonucleotide
tgttatccatcctttcgact

SEQ ID NO: 561 - DNA, 20 bp, Artificial sequence
  Synthetic oligonucleotide
cataacctttgcctatctcc

SEQ ID NO: 562 - DNA, 20 bp, Artificial sequence
  Synthetic oligonucleotide
cattaattgtcataaattcc

SEQ ID NO: 563 - DNA, 20 bp, Artificial sequence
  Synthetic oligonucleotide
ccacaagttcattaacaagc

SEQ ID NO: 564 - DNA, 20 bp, Artificial sequence
  Synthetic oligonucleotide
ggagaattaacttatccctc

SEQ ID NO: 565 - DNA, 20 bp, Artificial sequence
  Synthetic oligonucleotide
gcacaatgacatacatatct

SEQ ID NO: 566 - DNA, 20 bp, Artificial sequence
  Synthetic oligonucleotide
gatctttatccctatgtaca

SEQ ID NO: 567 - DNA, 20 bp, Artificial sequence
  Synthetic oligonucleotide
gcataatcactctgaccttt

SEQ ID NO: 568 - DNA, 20 bp, Artificial sequence
  Synthetic oligonucleotide
ctctagctaaatttcagcca

SEQ ID NO: 569 - DNA, 20 bp, Artificial sequence
  Synthetic oligonucleotide
gctgaccttatatccttttg

SEQ ID NO: 570 - DNA, 20 bp, Artificial sequence
  Synthetic oligonucleotide
tggcattcattcttccagtc

SEQ ID NO: 571 - DNA, 20 bp, Artificial sequence
  Synthetic oligonucleotide
gcatcttccccaaagaatct

SEQ ID NO: 572 - DNA, 20 bp, Artificial sequence
  Synthetic oligonucleotide
ttgtcgcttcttctgcagga

SEQ ID NO: 573 - DNA, 20 bp, Artificial sequence
  Synthetic oligonucleotide
atgcatcaattttcaggctc

SEQ ID NO: 574 - DNA, 20 bp, Artificial sequence
  Synthetic oligonucleotide
tttaatccataactccttgc

SEQ ID NO: 575 - DNA, 20 bp, Artificial sequence
  Synthetic oligonucleotide
aatgtcatatatacctagca

SEQ ID NO: 576 - DNA, 20 bp, Artificial sequence
  Synthetic oligonucleotide
cccaaactatagaatcatca

SEQ ID NO: 577 - DNA, 20 bp, Artificial sequence
  Synthetic oligonucleotide
ttgtatttgatgatccaaac

SEQ ID NO: 578 - DNA, 20 bp, Artificial sequence
  Synthetic oligonucleotide
aaggtattactcatttgctc

SEQ ID NO: 579 - DNA, 20 bp, Artificial sequence
  Synthetic oligonucleotide
atctataccatcctaagaaa

SEQ ID NO: 580 - DNA, 20 bp, Artificial sequence
  Synthetic oligonucleotide
agatgcaatttcactcattc

SEQ ID NO: 581 - DNA, 20 bp, Artificial sequence
  Synthetic oligonucleotide
aatgcagtcaacagttgcta

SEQ ID NO: 582 - DNA, 20 bp, Artificial sequence
  Synthetic oligonucleotide
ctaccaaatttccctatcca

SEQ ID NO: 583 - DNA, 20 bp, Artificial sequence
  Synthetic oligonucleotide
gcccatcattttccaatggt

SEQ ID NO: 584 - DNA, 20 bp, Artificial sequence
  Synthetic oligonucleotide
aaactatcaaacacaacctc

SEQ ID NO: 585 - DNA, 20 bp, Artificial sequence
  Synthetic oligonucleotide
tctgtcttaaatcctatcac

SEQ ID NO: 586 - DNA, 20 bp, Artificial sequence
  Synthetic oligonucleotide
taacatcttatacctggctt

SEQ ID NO: 587 - DNA, 20 bp, Artificial sequence
  Synthetic oligonucleotide
atgtcatatatacctagcac

SEQ ID NO: 588 - DNA, 20 bp, Artificial sequence
  Synthetic oligonucleotide
ctgcaaatctctcctgcaga

SEQ ID NO: 589 - DNA, 20 bp, Artificial sequence
  Synthetic oligonucleotide
atttattaatccttccagct

SEQ ID NO: 590 - DNA, 20 bp, Artificial sequence
  Synthetic oligonucleotide
tcaacatttattccacccct

SEQ ID NO: 591 - DNA, 20 bp, Artificial sequence
  Synthetic oligonucleotide
agttcttacaacaatgtcac

SEQ ID NO: 592 - DNA, 20 bp, Artificial sequence
  Synthetic oligonucleotide
gtgagataatatctcctgtc

SEQ ID NO: 593 - DNA, 20 bp, Artificial sequence
  Synthetic oligonucleotide
gtgatgcactgctttacaca

SEQ ID NO: 594 - DNA, 20 bp, Artificial sequence
  Synthetic oligonucleotide
ataacctttgcctatctcct

SEQ ID NO: 595 - DNA, 20 bp, Artificial sequence
  Synthetic oligonucleotide
catcatgattttccacggta

SEQ ID NO: 596 - DNA, 20 bp, Artificial sequence
  Synthetic oligonucleotide
agcatagcactttatgatta

SEQ ID NO: 597 - DNA, 20 bp, Artificial sequence
  Synthetic oligonucleotide
cttgacattacctcctgtcc

SEQ ID NO: 598 - DNA, 20 bp, Artificial sequence
  Synthetic oligonucleotide
cggatacttacatctctgat

SEQ ID NO: 599 - DNA, 20 bp, Artificial sequence
  Synthetic oligonucleotide
actatcaaacacaacctcgc

SEQ ID NO: 600 - DNA, 20 bp, Artificial sequence
  Synthetic oligonucleotide
ccactcatgaacaccacatt

SEQ ID NO: 601 - DNA, 20 bp, Artificial sequence
  Synthetic oligonucleotide
ttgaactcctctgtccactt

SEQ ID NO: 602 - DNA, 20 bp, Artificial sequence
  Synthetic oligonucleotide
tctcagtgaaactttccccg

SEQ ID NO: 603 - DNA, 20 bp, Artificial sequence
  Synthetic oligonucleotide
cccatcattttccaatggtc

SEQ ID NO: 604 - DNA, 20 bp, Artificial sequence
  Synthetic oligonucleotide
gtacaaatactccacagtca

SEQ ID NO: 605 - DNA, 20 bp, Artificial sequence
  Synthetic oligonucleotide
tacagcatcaagccgggcat

SEQ ID NO: 606 - DNA, 20 bp, Artificial sequence
  Synthetic oligonucleotide
tgaacaatcctatacacatc

SEQ ID NO: 607 - DNA, 20 bp, Artificial sequence
  Synthetic oligonucleotide
gtcgcttcttctgcaggaac

SEQ ID NO: 608 - DNA, 20 bp, Artificial sequence
  Synthetic oligonucleotide
actgttccttcatatgtcta

SEQ ID NO: 609 - DNA, 20 bp, Artificial sequence
  Synthetic oligonucleotide
gacaaattataactacacat

SEQ ID NO: 610 - DNA, 20 bp, Artificial sequence
  Synthetic oligonucleotide
cccaaactgtatttcagact

SEQ ID NO: 611 - DNA, 20 bp, Artificial sequence
  Synthetic oligonucleotide
gtatttgatgatccaaactg

SEQ ID NO: 612 - DNA, 20 bp, Artificial sequence
  Synthetic oligonucleotide
acctaaaattttcatacgct

SEQ ID NO: 613 - DNA, 20 bp, Artificial sequence
  Synthetic oligonucleotide
ttgctttgaaccatcagact

SEQ ID NO: 614 - DNA, 20 bp, Artificial sequence
  Synthetic oligonucleotide
cttggactttattcctgtta

SEQ ID NO: 615 - DNA, 20 bp, Artificial sequence
  Synthetic oligonucleotide
tcatcagtttcccatgtctt

SEQ ID NO: 616 - DNA, 20 bp, Artificial sequence
  Synthetic oligonucleotide
atgctgattttctccactac

SEQ ID NO: 617 - DNA, 20 bp, Artificial sequence
  Synthetic oligonucleotide
gttcttccataaatgtactc

SEQ ID NO: 618 - DNA, 20 bp, Artificial sequence
  Synthetic oligonucleotide
catcttccccaaagaatcta

SEQ ID NO: 619 - DNA, 20 bp, Artificial sequence
  Synthetic oligonucleotide
cccacttctttaacttccgt

SEQ ID NO: 620 - DNA, 20 bp, Artificial sequence
  Synthetic oligonucleotide
tttaaacctaccttccaacc

SEQ ID NO: 621 - DNA, 20 bp, Artificial sequence
  Synthetic oligonucleotide
acctgcaaagtacttaccac

SEQ ID NO: 622 - DNA, 20 bp, Artificial sequence
  Synthetic oligonucleotide
ttgacaatcaagaagaactc

SEQ ID NO: 623 - DNA, 20 bp, Artificial sequence
  Synthetic oligonucleotide
tgtactacactataactgca

SEQ ID NO: 624 - DNA, 20 bp, Artificial sequence
  Synthetic oligonucleotide
acagcatcatccagcttgat

SEQ ID NO: 625 - DNA, 20 bp, Artificial sequence
  Synthetic oligonucleotide
atttcatccaacaatcttta

SEQ ID NO: 626 - DNA, 20 bp, Artificial sequence
  Synthetic oligonucleotide
atatcaccctccaaaagctt

SEQ ID NO: 627 - DNA, 20 bp, Artificial sequence
  Synthetic oligonucleotide
gtagatgattttctatctga

SEQ ID NO: 628 - DNA, 20 bp, Artificial sequence
  Synthetic oligonucleotide
agtagattataccttgacca

SEQ ID NO: 629 - DNA, 20 bp, Artificial sequence
  Synthetic oligonucleotide
tctataccatcctaagaaac

SEQ ID NO: 630 - DNA, 20 bp, Artificial sequence
  Synthetic oligonucleotide
acacatacttcacatttgac

SEQ ID NO: 631 - DNA, 20 bp, Artificial sequence
  Synthetic oligonucleotide
ctgaccttatatccttttgc

SEQ ID NO: 632 - DNA, 20 bp, Artificial sequence
  Synthetic oligonucleotide
taggtataattccatcttca

SEQ ID NO: 633 - DNA, 20 bp, Artificial sequence
  Synthetic oligonucleotide
catctatatttctctacatc

SEQ ID NO: 634 - DNA, 20 bp, Artificial sequence
  Synthetic oligonucleotide
aatccataactccttgctgc

SEQ ID NO: 635 - DNA, 20 bp, Artificial sequence
  Synthetic oligonucleotide
ccactagatttcttcactat

SEQ ID NO: 636 - DNA, 20 bp, Artificial sequence
  Synthetic oligonucleotide
taattgtcataaattccatt

SEQ ID NO: 637 - DNA, 20 bp, Artificial sequence
  Synthetic oligonucleotide
aaatcaagccattcagcact

SEQ ID NO: 638 - DNA, 20 bp, Artificial sequence
  Synthetic oligonucleotide
ccaactcatatatctttctc

SEQ ID NO: 639 - DNA, 20 bp, Artificial sequence
  Synthetic oligonucleotide
attatcattactctctctga

SEQ ID NO: 640 - DNA, 20 bp, Artificial sequence
  Synthetic oligonucleotide
taccaaatttccctatccat

SEQ ID NO: 641 - DNA, 20 bp, Artificial sequence
  Synthetic oligonucleotide
aagacgcaccccttgcccac

SEQ ID NO: 642 - DNA, 20 bp, Artificial sequence
  Synthetic oligonucleotide
ttcagttttatccccaactc

SEQ ID NO: 643 - DNA, 20 bp, Artificial sequence
  Synthetic oligonucleotide
gctacaactccttcttttta

SEQ ID NO: 644 - DNA, 20 bp, Artificial sequence
  Synthetic oligonucleotide
agcatcttttccaagttgaa

SEQ ID NO: 645 - DNA, 20 bp, Artificial sequence
  Synthetic oligonucleotide
ggcaaactaatacattccac

SEQ ID NO: 646 - DNA, 20 bp, Artificial sequence
  Synthetic oligonucleotide
gccaattctttctacttata

SEQ ID NO: 647 - DNA, 20 bp, Artificial sequence
  Synthetic oligonucleotide
ctgttgtctccaatggcctt

SEQ ID NO: 648 - DNA, 20 bp, Artificial sequence
  Synthetic oligonucleotide
acaagcattcatgacttcca

SEQ ID NO: 649 - DNA, 20 bp, Artificial sequence
  Synthetic oligonucleotide
gctttcttctagtcacccaa

SEQ ID NO: 650 - DNA, 20 bp, Artificial sequence
  Synthetic oligonucleotide
gttatccatcctttcgactc

SEQ ID NO: 651 - DNA, 20 bp, Artificial sequence
  Synthetic oligonucleotide
ctcaacctataaagtagtgc

SEQ ID NO: 652 - DNA, 20 bp, Artificial sequence
  Synthetic oligonucleotide
gatgcaatttcactcattcc

SEQ ID NO: 653 - DNA, 20 bp, Artificial sequence
  Synthetic oligonucleotide
acattcataccttctgatcc

SEQ ID NO: 654 - DNA, 20 bp, Artificial sequence
  Synthetic oligonucleotide
ctcactgaccaagaatccca

SEQ ID NO: 655 - DNA, 20 bp, Artificial sequence
  Synthetic oligonucleotide
actgtcttcagaaaaacctc

SEQ ID NO: 656 - DNA, 20 bp, Artificial sequence
  Synthetic oligonucleotide
gaatcccccacaactcacca

SEQ ID NO: 657 - DNA, 20 bp, Artificial sequence
  Synthetic oligonucleotide
acatattgatcctgttctcc

SEQ ID NO: 658 - DNA, 20 bp, Artificial sequence
  Synthetic oligonucleotide
gtgcttctataaacatgacc

SEQ ID NO: 659 - DNA, 20 bp, Artificial sequence
  Synthetic oligonucleotide
gccaatattctttttctgga

SEQ ID NO: 660 - DNA, 20 bp, Artificial sequence
  Synthetic oligonucleotide
acaactttttcccaaactct

SEQ ID NO: 661 - DNA, 20 bp, Artificial sequence
  Synthetic oligonucleotide
atgacatacatatctaacca

SEQ ID NO: 662 - DNA, 20 bp, Artificial sequence
  Synthetic oligonucleotide
ctgtcttaaatcctatcacc

SEQ ID NO: 663 - DNA, 20 bp, Artificial sequence
  Synthetic oligonucleotide
ttgacattacctcctgtcct

SEQ ID NO: 664 - DNA, 20 bp, Artificial sequence
  Synthetic oligonucleotide
atccataactccttgctgca

SEQ ID NO: 665 - DNA, 20 bp, Artificial sequence
  Synthetic oligonucleotide
ttaaacctaccttccaacct

SEQ ID NO: 666 - DNA, 20 bp, Artificial sequence
  Synthetic oligonucleotide
tgtctattatcttccaattc

SEQ ID NO: 667 - DNA, 20 bp, Artificial sequence
  Synthetic oligonucleotide
gaggtaactcttccatggtc

SEQ ID NO: 668 - DNA, 20 bp, Artificial sequence
  Synthetic oligonucleotide
gacgcaccccttgcccacaa

SEQ ID NO: 669 - DNA, 20 bp, Artificial sequence
  Synthetic oligonucleotide
actacactataactgcatct

SEQ ID NO: 670 - DNA, 20 bp, Artificial sequence
  Synthetic oligonucleotide
tcatccaacaatctttaaac

SEQ ID NO: 671 - DNA, 20 bp, Artificial sequence
  Synthetic oligonucleotide
gtctcattttcacctgatta

SEQ ID NO: 672 - DNA, 20 bp, Artificial sequence
  Synthetic oligonucleotide
cacatacttcacatttgacc

SEQ ID NO: 673 - DNA, 20 bp, Artificial sequence
  Synthetic oligonucleotide
tccatcctttcgactcgaat

SEQ ID NO: 674 - DNA, 20 bp, Artificial sequence
  Synthetic oligonucleotide
tgtcttaaatcctatcacct

SEQ ID NO: 675 - DNA, 20 bp, Artificial sequence
  Synthetic oligonucleotide
attgatcctgttctcccagc

SEQ ID NO: 676 - DNA, 20 bp, Artificial sequence
  Synthetic oligonucleotide
cttccataaatgtactctgt

SEQ ID NO: 677 - DNA, 20 bp, Artificial sequence
  Synthetic oligonucleotide
tatcattactctctctgagt

SEQ ID NO: 678 - DNA, 20 bp, Artificial sequence
  Synthetic oligonucleotide
atgcaatttcactcattcct

SEQ ID NO: 679 - DNA, 20 bp, Artificial sequence
  Synthetic oligonucleotide
acattgcctttacaattgct

SEQ ID NO: 680 - DNA, 20 bp, Artificial sequence
  Synthetic oligonucleotide
acagtcaattcttacaagca

SEQ ID NO: 681 - DNA, 20 bp, Artificial sequence
  Synthetic oligonucleotide
ctatcaaacacaacctcgcc

SEQ ID NO: 682 - DNA, 20 bp, Artificial sequence
  Synthetic oligonucleotide
tcaatggatagattcctgcc

SEQ ID NO: 683 - DNA, 20 bp, Artificial sequence
  Synthetic oligonucleotide
agctctttaattcctcccct

SEQ ID NO: 684 - DNA, 20 bp, Artificial sequence
  Synthetic oligonucleotide
atcccccacaactcaccaga

SEQ ID NO: 685 - DNA, 20 bp, Artificial sequence
  Synthetic oligonucleotide
cttgggtagaacactgaaaa

SEQ ID NO: 686 - DNA, 20 bp, Artificial sequence
  Synthetic oligonucleotide
tgcactgctttacacaagga

SEQ ID NO: 687 - DNA, 20 bp, Artificial sequence
  Synthetic oligonucleotide
caacatttattccaccccta

SEQ ID NO: 688 - DNA, 20 bp, Artificial sequence
  Synthetic oligonucleotide
atttgatgatccaaactgac

SEQ ID NO: 689 - DNA, 20 bp, Artificial sequence
  Synthetic oligonucleotide
tcttcactataccttttccc

SEQ ID NO: 690 - DNA, 20 bp, Artificial sequence
  Synthetic oligonucleotide
ttggactttattcctgttaa

SEQ ID NO: 691 - DNA, 20 bp, Artificial sequence
  Synthetic oligonucleotide
taacctttgcctatctcctc

SEQ ID NO: 692 - DNA, 20 bp, Artificial sequence
  Synthetic oligonucleotide
aagccgggcatttatttccc

SEQ ID NO: 693 - DNA, 20 bp, Artificial sequence
  Synthetic oligonucleotide
atgctaccatccttttcatt

SEQ ID NO: 694 - DNA, 20 bp, Artificial sequence
  Synthetic oligonucleotide
ccacttctttaacttccgtc

SEQ ID NO: 695 - DNA, 20 bp, Artificial sequence
  Synthetic oligonucleotide
tgcttctataaacatgacct

SEQ ID NO: 696 - DNA, 20 bp, Artificial sequence
  Synthetic oligonucleotide
acagtacttcagaacccact

SEQ ID NO: 697 - DNA, 20 bp, Artificial sequence
  Synthetic oligonucleotide
gcagcagcaatcttacaact

SEQ ID NO: 698 - DNA, 20 bp, Artificial sequence
  Synthetic oligonucleotide
ttgatcttactatacaactt

SEQ ID NO: 699 - DNA, 20 bp, Artificial sequence
  Synthetic oligonucleotide
agtgaagttctatcacacca

SEQ ID NO: 700 - DNA, 20 bp, Artificial sequence
  Synthetic oligonucleotide
tcagttttatccccaactct

SEQ ID NO: 701 - DNA, 20 bp, Artificial sequence
  Synthetic oligonucleotide
tagatgattttctatctgac

SEQ ID NO: 702 - DNA, 20 bp, Artificial sequence
  Synthetic oligonucleotide
gtatttcagactttataatc

SEQ ID NO: 703 - DNA, 20 bp, Artificial sequence
  Synthetic oligonucleotide
gaactcctctgtccacttct

SEQ ID NO: 704 - DNA, 20 bp, Artificial sequence
  Synthetic oligonucleotide
gcagaatactaagataagct

SEQ ID NO: 705 - DNA, 20 bp, Artificial sequence
  Synthetic oligonucleotide
tatcaccctccaaaagcttg

SEQ ID NO: 706 - DNA, 20 bp, Artificial sequence
  Synthetic oligonucleotide
ccatcattttccaatggtct

SEQ ID NO: 707 - DNA, 20 bp, Artificial sequence
  Synthetic oligonucleotide
agcatcatccagcttgatta

SEQ ID NO: 708 - DNA, 20 bp, Artificial sequence
  Synthetic oligonucleotide
cattcataccttctgatcca

SEQ ID NO: 709 - DNA, 20 bp, Artificial sequence
  Synthetic oligonucleotide
gaaccatcagactatggcaa

SEQ ID NO: 710 - DNA, 20 bp, Artificial sequence
  Synthetic oligonucleotide
cctgcacatatccctcacta

SEQ ID NO: 711 - DNA, 20 bp, Artificial sequence
  Synthetic oligonucleotide
aacatcttatacctggcttt

SEQ ID NO: 712 - DNA, 20 bp, Artificial sequence
  Synthetic oligonucleotide
caactcatatatctttctcc

SEQ ID NO: 713 - DNA, 20 bp, Artificial sequence
  Synthetic oligonucleotide
tcactgaccaagaatcccat

SEQ ID NO: 714 - DNA, 20 bp, Artificial sequence
  Synthetic oligonucleotide
tttcttctagtcacccaatc

SEQ ID NO: 715 - DNA, 20 bp, Artificial sequence
  Synthetic oligonucleotide
tccaaaggctttatctgttc

SEQ ID NO: 716 - DNA, 20 bp, Artificial sequence
  Synthetic oligonucleotide
caatcctatacacatctcca

SEQ ID NO: 717 - DNA, 20 bp, Artificial sequence
  Synthetic oligonucleotide
tgaccttatatccttttgcc

SEQ ID NO: 718 - DNA, 20 bp, Artificial sequence
  Synthetic oligonucleotide
tttattaatccttccagctc

SEQ ID NO: 719 - DNA, 20 bp, Artificial sequence
  Synthetic oligonucleotide
gctaaatatctttcccagca

SEQ ID NO: 720 - DNA, 20 bp, Artificial sequence
  Synthetic oligonucleotide
tcaagccattcagcactgca

SEQ ID NO: 721 - DNA, 20 bp, Artificial sequence
  Synthetic oligonucleotide
cactcatgaacaccacattt

SEQ ID NO: 722 - DNA, 20 bp, Artificial sequence
  Synthetic oligonucleotide
tgtcatatatacctagcaca

SEQ ID NO: 723 - DNA, 20 bp, Artificial sequence
  Synthetic oligonucleotide
ttggtaattatcatcatcca

SEQ ID NO: 724 - DNA, 20 bp, Artificial sequence
  Synthetic oligonucleotide
aagcattcatgacttccaac

SEQ ID NO: 725 - DNA, 20 bp, Artificial sequence
  Synthetic oligonucleotide
tctgcaggaacataggagcc

SEQ ID NO: 726 - DNA, 20 bp, Artificial sequence
  Synthetic oligonucleotide
ttcatatgtctatatggctc

SEQ ID NO: 727 - DNA, 20 bp, Artificial sequence
  Synthetic oligonucleotide
gatacttacatctctgatga

SEQ ID NO: 728 - DNA, 20 bp, Artificial sequence
  Synthetic oligonucleotide
gcatcttttccaagttgaat

SEQ ID NO: 729 - DNA, 20 bp, Artificial sequence
  Synthetic oligonucleotide
ctataccatcctaagaaact

SEQ ID NO: 730 - DNA, 20 bp, Artificial sequence
  Synthetic oligonucleotide
cttcactatttttacccagc

SEQ ID NO: 731 - DNA, 20 bp, Artificial sequence
  Synthetic oligonucleotide
ccaatggcctttaatgctgc

SEQ ID NO: 732 - DNA, 20 bp, Artificial sequence
  Synthetic oligonucleotide
taaaacatctttctacggtc

SEQ ID NO: 733 - DNA, 20 bp, Artificial sequence
  Synthetic oligonucleotide
atcttccccaaagaatctat

SEQ ID NO: 734 - DNA, 20 bp, Artificial sequence
  Synthetic oligonucleotide
ctgtcttcagaaaaacctct

SEQ ID NO: 735 - DNA, 20 bp, Artificial sequence
  Synthetic oligonucleotide
tcataaccattgcattgcac

SEQ ID NO: 736 - DNA, 20 bp, Artificial sequence
  Synthetic oligonucleotide
ctcagtgaaactttccccga

SEQ ID NO: 737 - DNA, 20 bp, Artificial sequence
  Synthetic oligonucleotide
agtacttaccacaatgccaa

SEQ ID NO: 738 - DNA, 20 bp, Artificial sequence
  Synthetic oligonucleotide
gtcataaattccattttact

SEQ ID NO: 739 - DNA, 20 bp, Artificial sequence
  Synthetic oligonucleotide
cttcactataccttttccct

SEQ ID NO: 740 - DNA, 20 bp, Artificial sequence
  Synthetic oligonucleotide
gctctttaattcctcccctt

SEQ ID NO: 741 - DNA, 20 bp, Artificial sequence
  Synthetic oligonucleotide
taaacctaccttccaacctt

SEQ ID NO: 742 - DNA, 20 bp, Artificial sequence
  Synthetic oligonucleotide
aacctttgcctatctcctca

SEQ ID NO: 743 - DNA, 20 bp, Artificial sequence
  Synthetic oligonucleotide
acatacttcacatttgacct

SEQ ID NO: 744 - DNA, 20 bp, Artificial sequence
  Synthetic oligonucleotide
ttggcacttacacttacttt

SEQ ID NO: 745 - DNA, 20 bp, Artificial sequence
  Synthetic oligonucleotide
tgtcttcagaaaaacctctc

SEQ ID NO: 746 - DNA, 20 bp, Artificial sequence
  Synthetic oligonucleotide
cagttttatccccaactcta

SEQ ID NO: 747 - DNA, 20 bp, Artificial sequence
  Synthetic oligonucleotide
gcaccccttgcccacaagcc

SEQ ID NO: 748 - DNA, 20 bp, Artificial sequence
  Synthetic oligonucleotide
caatggcctttaatgctgca

SEQ ID NO: 749 - DNA, 20 bp, Artificial sequence
  Synthetic oligonucleotide
ctgtcaatttctgtagccta

SEQ ID NO: 750 - DNA, 20 bp, Artificial sequence
  Synthetic oligonucleotide
ctgcacatatccctcactaa

SEQ ID NO: 751 - DNA, 20 bp, Artificial sequence
  Synthetic oligonucleotide
actgaccaagaatcccatgt

SEQ ID NO: 752 - DNA, 20 bp, Artificial sequence
  Synthetic oligonucleotide
ttattaatccttccagctct

SEQ ID NO: 753 - DNA, 20 bp, Artificial sequence
  Synthetic oligonucleotide
gaccttatatccttttgcca

SEQ ID NO: 754 - DNA, 20 bp, Artificial sequence
  Synthetic oligonucleotide
actggatactcatctatagc

SEQ ID NO: 755 - DNA, 20 bp, Artificial sequence
  Synthetic oligonucleotide
tggttactcaattacagttc

SEQ ID NO: 756 - DNA, 20 bp, Artificial sequence
  Synthetic oligonucleotide
acttattgttcaatttggct

SEQ ID NO: 757 - DNA, 20 bp, Artificial sequence
  Synthetic oligonucleotide
tataccatcctaagaaactt

SEQ ID NO: 758 - DNA, 20 bp, Artificial sequence
  Synthetic oligonucleotide
aactcatatatctttctccc

SEQ ID NO: 759 - DNA, 20 bp, Artificial sequence
  Synthetic oligonucleotide
tctgtccacttctgcaggtc

SEQ ID NO: 760 - DNA, 20 bp, Artificial sequence
  Synthetic oligonucleotide
agatgattttctatctgacc

SEQ ID NO: 761 - DNA, 20 bp, Artificial sequence
  Synthetic oligonucleotide
attccattttacttgatagc

SEQ ID NO: 762 - DNA, 20 bp, Artificial sequence
  Synthetic oligonucleotide
ccattcagcactgcagtcaa

SEQ ID NO: 763 - DNA, 20 bp, Artificial sequence
  Synthetic oligonucleotide
gctaccatccttttcattcc

SEQ ID NO: 764 - DNA, 20 bp, Artificial sequence
  Synthetic oligonucleotide
gaagttctatcacaccattc

SEQ ID NO: 765 - DNA, 20 bp, Artificial sequence
  Synthetic oligonucleotide
tccataaatgtactctgtcc

SEQ ID NO: 766 - DNA, 20 bp, Artificial sequence
  Synthetic oligonucleotide
cacttctttaacttccgtct

SEQ ID NO: 767 - DNA, 20 bp, Artificial sequence
  Synthetic oligonucleotide
aggttgataaactaacagct

SEQ ID NO: 768 - DNA, 20 bp, Artificial sequence
  Synthetic oligonucleotide
tggtaattatcatcatccaa

SEQ ID NO: 769 - DNA, 20 bp, Artificial sequence
  Synthetic oligonucleotide
gggattcacatttaataata

SEQ ID NO: 770 - DNA, 20 bp, Artificial sequence
  Synthetic oligonucleotide
gcttcacaataaccatgtaa

SEQ ID NO: 771 - DNA, 20 bp, Artificial sequence
  Synthetic oligonucleotide
tcactatttttacccagctt

SEQ ID NO: 772 - DNA, 20 bp, Artificial sequence
  Synthetic oligonucleotide
gtaaaagtattcttccacat

SEQ ID NO: 773 - DNA, 20 bp, Artificial sequence
  Synthetic oligonucleotide
tgggattatatatactgcat

SEQ ID NO: 774 - DNA, 20 bp, Artificial sequence
  Synthetic oligonucleotide
ccatcctttcgactcgaatt

SEQ ID NO: 775 - DNA, 20 bp, Artificial sequence
  Synthetic oligonucleotide
ttcttctagtcacccaatcc

SEQ ID NO: 776 - DNA, 20 bp, Artificial sequence
  Synthetic oligonucleotide
attgcatactttcctacctt

SEQ ID NO: 777 - DNA, 20 bp, Artificial sequence
  Synthetic oligonucleotide
ttgatcctgttctcccagca

SEQ ID NO: 778 - DNA, 20 bp, Artificial sequence
  Synthetic oligonucleotide
tcagtgaaactttccccgat

SEQ ID NO: 779 - DNA, 20 bp, Artificial sequence
  Synthetic oligonucleotide
caagttgaattctttgaggt

SEQ ID NO: 780 - DNA, 20 bp, Artificial sequence
  Synthetic oligonucleotide
cagagtctttgataccattc

SEQ ID NO: 781 - DNA, 20 bp, Artificial sequence
  Synthetic oligonucleotide
ttcaacttatgaatttatcc

SEQ ID NO: 782 - DNA, 20 bp, Artificial sequence
  Synthetic oligonucleotide
gcagagattctgtctggact

SEQ ID NO: 783 - DNA, 20 bp, Artificial sequence
  Synthetic oligonucleotide
accctccaaaagcttgggaa

SEQ ID NO: 784 - DNA, 20 bp, Artificial sequence
  Synthetic oligonucleotide
catctgcaatactttcccta

SEQ ID NO: 785 - DNA, 20 bp, Artificial sequence
  Synthetic oligonucleotide
ccgggcatttatttccctgt

SEQ ID NO: 786 - DNA, 20 bp, Artificial sequence
  Synthetic oligonucleotide
cttgacccatattttcctaa

SEQ ID NO: 787 - DNA, 20 bp, Artificial sequence
  Synthetic oligonucleotide
gcactgctttacacaaggag

SEQ ID NO: 788 - DNA, 20 bp, Artificial sequence
  Synthetic oligonucleotide
cctgcaacaaatatctcata

SEQ ID NO: 789 - DNA, 20 bp, Artificial sequence
  Synthetic oligonucleotide
gcaatttcactcattcctga

SEQ ID NO: 790 - DNA, 20 bp, Artificial sequence
  Synthetic oligonucleotide
cttcacttttactaacagct

SEQ ID NO: 791 - DNA, 20 bp, Artificial sequence
  Synthetic oligonucleotide
caatggatagattcctgcca

SEQ ID NO: 792 - DNA, 20 bp, Artificial sequence
  Synthetic oligonucleotide
ttgcacttttaacccaaggt

SEQ ID NO: 793 - DNA, 20 bp, Artificial sequence
  Synthetic oligonucleotide
tgcttgctactctataaaac

SEQ ID NO: 794 - DNA, 20 bp, Artificial sequence
  Synthetic oligonucleotide
atatctcttttcatcaacgc

SEQ ID NO: 795 - DNA, 20 bp, Artificial sequence
  Synthetic oligonucleotide
ccagtttgatcactatcttt

SEQ ID NO: 796 - DNA, 20 bp, Artificial sequence
  Synthetic oligonucleotide
acattacctcctgtcctgat

SEQ ID NO: 797 - DNA, 20 bp, Artificial sequence
  Synthetic oligonucleotide
actttcttgcaataagcatt

SEQ ID NO: 798 - DNA, 20 bp, Artificial sequence
  Synthetic oligonucleotide
aaaacatctttctacggtct

SEQ ID NO: 799 - DNA, 20 bp, Artificial sequence
  Synthetic oligonucleotide
acatctctgatgaaatactc

SEQ ID NO: 800 - DNA, 20 bp, Artificial sequence
  Synthetic oligonucleotide
tcagactttataatctaaac

SEQ ID NO: 801 - DNA, 20 bp, Artificial sequence
  Synthetic oligonucleotide
tttgatgatccaaactgact

SEQ ID NO: 802 - DNA, 20 bp, Artificial sequence
  Synthetic oligonucleotide
gtatcattagataccctgtc

SEQ ID NO: 803 - DNA, 20 bp, Artificial sequence
  Synthetic oligonucleotide
tatcaaacacaacctcgcct

SEQ ID NO: 804 - DNA, 20 bp, Artificial sequence
  Synthetic oligonucleotide
cccccacaactcaccagagt

SEQ ID NO: 805 - DNA, 20 bp, Artificial sequence
  Synthetic oligonucleotide
ccaacatgtttccttaactt

SEQ ID NO: 806 - DNA, 20 bp, Artificial sequence
  Synthetic oligonucleotide
catccaacaatctttaaact

SEQ ID NO: 807 - DNA, 20 bp, Artificial sequence
  Synthetic oligonucleotide
ccccaaagaatctatactta

SEQ ID NO: 808 - DNA, 20 bp, Artificial sequence
  Synthetic oligonucleotide
gtcttaaatcctatcacctc

SEQ ID NO: 809 - DNA, 20 bp, Artificial sequence
  Synthetic oligonucleotide
tccaatatataaccagacaa

SEQ ID NO: 810 - DNA, 20 bp, Artificial sequence
  Synthetic oligonucleotide
ccataactccttgctgcaat

SEQ ID NO: 811 - DNA, 20 bp, Artificial sequence
  Synthetic oligonucleotide
agtagatataccaatctact

SEQ ID NO: 812 - DNA, 20 bp, Artificial sequence
  Synthetic oligonucleotide
gtacttaccacaatgccaat

SEQ ID NO: 813 - DNA, 20 bp, Artificial sequence
  Synthetic oligonucleotide
acattcttgctattcggctc

SEQ ID NO: 814 - DNA, 20 bp, Artificial sequence
  Synthetic oligonucleotide
atcattactctctctgagtc

SEQ ID NO: 815 - DNA, 20 bp, Artificial sequence
  Synthetic oligonucleotide
gatgattttctatctgacca

SEQ ID NO: 816 - DNA, 20 bp, Artificial sequence
  Synthetic oligonucleotide
tggttcatttcacacagtac

SEQ ID NO: 817 - DNA, 20 bp, Artificial sequence
  Synthetic oligonucleotide
gggcatttatttccctgtga

SEQ ID NO: 818 - DNA, 20 bp, Artificial sequence
  Synthetic oligonucleotide
gacacttttatatactctta

SEQ ID NO: 819 - DNA, 20 bp, Artificial sequence
  Synthetic oligonucleotide
tcattactctctctgagtcc

SEQ ID NO: 820 - DNA, 20 bp, Artificial sequence
  Synthetic oligonucleotide
tgatgatccaaactgactga

SEQ ID NO: 821 - DNA, 20 bp, Artificial sequence
  Synthetic oligonucleotide
gctgcagtttcagtttgctt

SEQ ID NO: 822 - DNA, 20 bp, Artificial sequence
  Synthetic oligonucleotide
ctaccacttacacttacagt

SEQ ID NO: 823 - DNA, 20 bp, Artificial sequence
  Synthetic oligonucleotide
tccaacaatctttaaactgc

SEQ ID NO: 824 - DNA, 20 bp, Artificial sequence
  Synthetic oligonucleotide
tcacatttgacctacagcac

SEQ ID NO: 825 - DNA, 20 bp, Artificial sequence
  Synthetic oligonucleotide
ctgcaatactttccctaagt

SEQ ID NO: 826 - DNA, 20 bp, Artificial sequence
  Synthetic oligonucleotide
atcatcatccaaaccatgtc

SEQ ID NO: 827 - DNA, 20 bp, Artificial sequence
  Synthetic oligonucleotide
ccataaatgtactctgtcct

SEQ ID NO: 828 - DNA, 20 bp, Artificial sequence
  Synthetic oligonucleotide
cttgcccacaagccccctca

SEQ ID NO: 829 - DNA, 20 bp, Artificial sequence
  Synthetic oligonucleotide
ataccatcctaagaaacttt

SEQ ID NO: 830 - DNA, 20 bp, Artificial sequence
  Synthetic oligonucleotide
cagactttataatctaaact

SEQ ID NO: 831 - DNA, 20 bp, Artificial sequence
  Synthetic oligonucleotide
catcctttcgactcgaattc

SEQ ID NO: 832 - DNA, 20 bp, Artificial sequence
  Synthetic oligonucleotide
gaccaagaatcccatgtggt

SEQ ID NO: 833 - DNA, 20 bp, Artificial sequence
  Synthetic oligonucleotide
acacagtatttcaccgttta

SEQ ID NO: 834 - DNA, 20 bp, Artificial sequence
  Synthetic oligonucleotide
gctcagacatattttatggt

SEQ ID NO: 835 - DNA, 20 bp, Artificial sequence
  Synthetic oligonucleotide
actcatatatctttctcccc

SEQ ID NO: 836 - DNA, 20 bp, Artificial sequence
  Synthetic oligonucleotide
gatcactatctttattaatc

SEQ ID NO: 837 - DNA, 20 bp, Artificial sequence
  Synthetic oligonucleotide
tggcacttacacttactttc

SEQ ID NO: 838 - DNA, 20 bp, Artificial sequence
  Synthetic oligonucleotide
ctggatactcatctatagca

SEQ ID NO: 839 - DNA, 20 bp, Artificial sequence
  Synthetic oligonucleotide
ccatccctattacttttcca

SEQ ID NO: 840 - DNA, 20 bp, Artificial sequence
  Synthetic oligonucleotide
ccccacaactcaccagagtt

SEQ ID NO: 841 - DNA, 20 bp, Artificial sequence
  Synthetic oligonucleotide
cttcagaaaaacctctctgt

SEQ ID NO: 842 - DNA, 20 bp, Artificial sequence
  Synthetic oligonucleotide
cataggagccaatctgagcc

SEQ ID NO: 843 - DNA, 20 bp, Artificial sequence
  Synthetic oligonucleotide
tttctaacttcatacatctc

SEQ ID NO: 844 - DNA, 20 bp, Artificial sequence
  Synthetic oligonucleotide
actgacatatttgtaaggac

SEQ ID NO: 845 - DNA, 20 bp, Artificial sequence
  Synthetic oligonucleotide
tagcacttaatacatcatgc

SEQ ID NO: 846 - DNA, 20 bp, Artificial sequence
  Synthetic oligonucleotide
tctggactctactttgagga

SEQ ID NO: 847 - DNA, 20 bp, Artificial sequence
  Synthetic oligonucleotide
atgatggcagccaaagagca

SEQ ID NO: 848 - DNA, 20 bp, Artificial sequence
  Synthetic oligonucleotide
tcagactaatgataacttcc

SEQ ID NO: 849 - DNA, 20 bp, Artificial sequence
  Synthetic oligonucleotide
cagtgaaactttccccgatc

SEQ ID NO: 850 - DNA, 20 bp, Artificial sequence
  Synthetic oligonucleotide
aagttctatcacaccattca

SEQ ID NO: 851 - DNA, 20 bp, Artificial sequence
  Synthetic oligonucleotide
cattacctcctgtcctgata

SEQ ID NO: 852 - DNA, 20 bp, Artificial sequence
  Synthetic oligonucleotide
acaatgttttactaatgcct

SEQ ID NO: 853 - DNA, 20 bp, Artificial sequence
  Synthetic oligonucleotide
ttgctcctattcccaactat

SEQ ID NO: 854 - DNA, 20 bp, Artificial sequence
  Synthetic oligonucleotide
ataccaatctactttcctac

SEQ ID NO: 855 - DNA, 20 bp, Artificial sequence
  Synthetic oligonucleotide
cctatagtttcccacagtct

SEQ ID NO: 856 - DNA, 20 bp, Artificial sequence
  Synthetic oligonucleotide
gaggaaccacactaatcctt

SEQ ID NO: 857 - DNA, 20 bp, Artificial sequence
  Synthetic oligonucleotide
catctctgatgaaatactca

SEQ ID NO: 858 - DNA, 20 bp, Artificial sequence
  Synthetic oligonucleotide
cccaaagaatctatacttat

SEQ ID NO: 859 - DNA, 20 bp, Artificial sequence
  Synthetic oligonucleotide
ttgtcacttatccttgaggc

SEQ ID NO: 860 - DNA, 20 bp, Artificial sequence
  Synthetic oligonucleotide
acttaccacaatgccaataa

SEQ ID NO: 861 - DNA, 20 bp, Artificial sequence
  Synthetic oligonucleotide
tgatcctgttctcccagcaa

SEQ ID NO: 862 - DNA, 20 bp, Artificial sequence
  Synthetic oligonucleotide
acttctttaacttccgtctc

SEQ ID NO: 863 - DNA, 20 bp, Artificial sequence
  Synthetic oligonucleotide
tgataatgttcactgaattt

SEQ ID NO: 864 - DNA, 20 bp, Artificial sequence
  Synthetic oligonucleotide
tgcctatctcctcaaacgga

SEQ ID NO: 865 - DNA, 20 bp, Artificial sequence
  Synthetic oligonucleotide
ctaccatccttttcattcct

SEQ ID NO: 866 - DNA, 20 bp, Artificial sequence
  Synthetic oligonucleotide
gtttcacttttccccactca

SEQ ID NO: 867 - DNA, 20 bp, Artificial sequence
  Synthetic oligonucleotide
agttttatccccaactctaa

SEQ ID NO: 868 - DNA, 20 bp, Artificial sequence
  Synthetic oligonucleotide
cactatttttacccagcttc

SEQ ID NO: 869 - DNA, 20 bp, Artificial sequence
  Synthetic oligonucleotide
atggatagattcctgccaga

SEQ ID NO: 870 - DNA, 20 bp, Artificial sequence
  Synthetic oligonucleotide
agtacacatatcataatgca

SEQ ID NO: 871 - DNA, 20 bp, Artificial sequence
  Synthetic oligonucleotide
ccatcactatgacctctgtc

SEQ ID NO: 872 - DNA, 20 bp, Artificial sequence
  Synthetic oligonucleotide
ctgcaacaaatatctcatat

SEQ ID NO: 873 - DNA, 20 bp, Artificial sequence
  Synthetic oligonucleotide
ttctgtagcctatatcggga

SEQ ID NO: 874 - DNA, 20 bp, Artificial sequence
  Synthetic oligonucleotide
actccttgctgcaattcctc

SEQ ID NO: 875 - DNA, 20 bp, Artificial sequence
  Synthetic oligonucleotide
ccattttataaaccaatgct

SEQ ID NO: 876 - DNA, 20 bp, Artificial sequence
  Synthetic oligonucleotide
tgctaacaacacctttccgt

SEQ ID NO: 877 - DNA, 20 bp, Artificial sequence
  Synthetic oligonucleotide
accttatatccttttgccac

SEQ ID NO: 878 - DNA, 20 bp, Artificial sequence
  Synthetic oligonucleotide
ttgatagctgtttaaaattc

SEQ ID NO: 879 - DNA, 20 bp, Artificial sequence
  Synthetic oligonucleotide
aacaagatttccttccaggc

SEQ ID NO: 880 - DNA, 20 bp, Artificial sequence
  Synthetic oligonucleotide
atccttccagctcttttgac

SEQ ID NO: 881 - DNA, 20 bp, Artificial sequence
  Synthetic oligonucleotide
gcttgggaattatattctgc

SEQ ID NO: 882 - DNA, 20 bp, Artificial sequence
  Synthetic oligonucleotide
aaacctaccttccaaccttt

SEQ ID NO: 883 - DNA, 20 bp, Artificial sequence
  Synthetic oligonucleotide
tgtatcttttactttgatac

SEQ ID NO: 884 - DNA, 20 bp, Artificial sequence
  Synthetic oligonucleotide
cgttctatcaacatatactt

SEQ ID NO: 885 - DNA, 20 bp, Artificial sequence
  Synthetic oligonucleotide
aacacaacctcgcctgtggc

SEQ ID NO: 886 - DNA, 20 bp, Artificial sequence
  Synthetic oligonucleotide
tcttctagtcacccaatcca

SEQ ID NO: 887 - DNA, 20 bp, Artificial sequence
  Synthetic oligonucleotide
gaggacttttcatattgaat

SEQ ID NO: 888 - DNA, 20 bp, Artificial sequence
  Synthetic oligonucleotide
ttgacccatattttcctaac

SEQ ID NO: 889 - DNA, 20 bp, Artificial sequence
  Synthetic oligonucleotide
agtcaaggactagctgctcc

SEQ ID NO: 890 - DNA, 20 bp, Artificial sequence
  Synthetic oligonucleotide
ctgtccacttctgcaggtct

SEQ ID NO: 891 - DNA, 20 bp, Artificial sequence
  Synthetic oligonucleotide
tgcacatatccctcactaat

SEQ ID NO: 892 - DNA, 20 bp, Artificial sequence
  Synthetic oligonucleotide
aaggactagctgctcccgga

SEQ ID NO: 893 - DNA, 20 bp, Artificial sequence
  Synthetic oligonucleotide
accaagaatcccatgtggta

SEQ ID NO: 894 - DNA, 20 bp, Artificial sequence
  Synthetic oligonucleotide
ataggagccaatctgagcca

SEQ ID NO: 895 - DNA, 20 bp, Artificial sequence
  Synthetic oligonucleotide
agtgaaactttccccgatca

SEQ ID NO: 896 - DNA, 20 bp, Artificial sequence
  Synthetic oligonucleotide
gcatgatctataccgacttt

SEQ ID NO: 897 - DNA, 20 bp, Artificial sequence
  Synthetic oligonucleotide
cattactctctctgagtcct

SEQ ID NO: 898 - DNA, 20 bp, Artificial sequence
  Synthetic oligonucleotide
gacaacaatttatccttgcc

SEQ ID NO: 899 - DNA, 20 bp, Artificial sequence
  Synthetic oligonucleotide
atgttcactgaatttcctac

SEQ ID NO: 900 - DNA, 20 bp, Artificial sequence
  Synthetic oligonucleotide
atgatccaaactgactgaga

SEQ ID NO: 901 - DNA, 20 bp, Artificial sequence
  Synthetic oligonucleotide
attggcattctctaagctcc

SEQ ID NO: 902 - DNA, 20 bp, Artificial sequence
  Synthetic oligonucleotide
tcagaaaaacctctctgttt

SEQ ID NO: 903 - DNA, 20 bp, Artificial sequence
  Synthetic oligonucleotide
atgtactctgtcctttatat

SEQ ID NO: 904 - DNA, 20 bp, Artificial sequence
  Synthetic oligonucleotide
ccacaactcaccagagttgc

SEQ ID NO: 905 - DNA, 20 bp, Artificial sequence
  Synthetic oligonucleotide
taccaatctactttcctaca

SEQ ID NO: 906 - DNA, 20 bp, Artificial sequence
  Synthetic oligonucleotide
tcacaccattcatttttagc

SEQ ID NO: 907 - DNA, 20 bp, Artificial sequence
  Synthetic oligonucleotide
tgcagcataccaattgcgca

SEQ ID NO: 908 - DNA, 20 bp, Artificial sequence
  Synthetic oligonucleotide
gactttataatctaaactac

SEQ ID NO: 909 - DNA, 20 bp, Artificial sequence
  Synthetic oligonucleotide
ttgtcacaaacttttaccta

SEQ ID NO: 910 - DNA, 20 bp, Artificial sequence
  Synthetic oligonucleotide
cctcactaatcacatccctc

SEQ ID NO: 911 - DNA, 20 bp, Artificial sequence
  Synthetic oligonucleotide
taagtatcatgattatccca

SEQ ID NO: 912 - DNA, 20 bp, Artificial sequence
  Synthetic oligonucleotide
tctgttttatctcataagca

SEQ ID NO: 913 - DNA, 20 bp, Artificial sequence
  Synthetic oligonucleotide
gggacatattcatatgttca

SEQ ID NO: 914 - DNA, 20 bp, Artificial sequence
  Synthetic oligonucleotide
gctttttaacttcatgattc

SEQ ID NO: 915 - DNA, 20 bp, Artificial sequence
  Synthetic oligonucleotide
acttcatacatctcgctctt

SEQ ID NO: 916 - DNA, 20 bp, Artificial sequence
  Synthetic oligonucleotide
tgacccatattttcctaaca

SEQ ID NO: 917 - DNA, 20 bp, Artificial sequence
  Synthetic oligonucleotide
ttctagtcacccaatccagc

SEQ ID NO: 918 - DNA, 20 bp, Artificial sequence
  Synthetic oligonucleotide
cctttcgactcgaattctgt

SEQ ID NO: 919 - DNA, 20 bp, Artificial sequence
  Synthetic oligonucleotide
atgattttctatctgaccaa

SEQ ID NO: 920 - DNA, 20 bp, Artificial sequence
  Synthetic oligonucleotide
gatcctgttctcccagcaac

SEQ ID NO: 921 - DNA, 20 bp, Artificial sequence
  Synthetic oligonucleotide
ctgcacacatttatcacctc

SEQ ID NO: 922 - DNA, 20 bp, Artificial sequence
  Synthetic oligonucleotide
cagctagacattatttgtac

SEQ ID NO: 923 - DNA, 20 bp, Artificial sequence
  Synthetic oligonucleotide
ctggactctactttgaggaa

SEQ ID NO: 924 - DNA, 20 bp, Artificial sequence
  Synthetic oligonucleotide
gaaccacactaatcctttta

SEQ ID NO: 925 - DNA, 20 bp, Artificial sequence
  Synthetic oligonucleotide
tcaccagtaacctcaccatc

SEQ ID NO: 926 - DNA, 20 bp, Artificial sequence
  Synthetic oligonucleotide
tctatagcagttacatacct

SEQ ID NO: 927 - DNA, 20 bp, Artificial sequence
  Synthetic oligonucleotide
ttgccacttaaaatttgggt

SEQ ID NO: 928 - DNA, 20 bp, Artificial sequence
  Synthetic oligonucleotide
tcagtttgcttcacaactcc

SEQ ID NO: 929 - DNA, 20 bp, Artificial sequence
  Synthetic oligonucleotide
ctctgatgaaatactcaagt

SEQ ID NO: 930 - DNA, 20 bp, Artificial sequence
  Synthetic oligonucleotide
ttggacatacttcaagtgct

SEQ ID NO: 931 - DNA, 20 bp, Artificial sequence
  Synthetic oligonucleotide
ccttatatccttttgccacc

SEQ ID NO: 932 - DNA, 20 bp, Artificial sequence
  Synthetic oligonucleotide
ctgtaatctatcattctgta

SEQ ID NO: 933 - DNA, 20 bp, Artificial sequence
  Synthetic oligonucleotide
tccttccagctcttttgact

SEQ ID NO: 934 - DNA, 20 bp, Artificial sequence
  Synthetic oligonucleotide
ttccaatgaaatataccctc

SEQ ID NO: 935 - DNA, 20 bp, Artificial sequence
  Synthetic oligonucleotide
atatatctttctccccagga

SEQ ID NO: 936 - DNA, 20 bp, Artificial sequence
  Synthetic oligonucleotide
cttgggaattatattctgcc

SEQ ID NO: 937 - DNA, 20 bp, Artificial sequence
  Synthetic oligonucleotide
tatctcctcaaacggaagta

SEQ ID NO: 938 - DNA, 20 bp, Artificial sequence
  Synthetic oligonucleotide
attacctcctgtcctgatac

SEQ ID NO: 939 - DNA, 20 bp, Artificial sequence
  Synthetic oligonucleotide
acacaacctcgcctgtggca

SEQ ID NO: 940 - DNA, 20 bp, Artificial sequence
  Synthetic oligonucleotide
gatagctgtttaaaattcct

SEQ ID NO: 941 - DNA, 20 bp, Artificial sequence
  Synthetic oligonucleotide
gccaataaaaatgttgccct

SEQ ID NO: 942 - DNA, 20 bp, Artificial sequence
  Synthetic oligonucleotide
ccagcttctatcactctctt

SEQ ID NO: 943 - DNA, 20 bp, Artificial sequence
  Synthetic oligonucleotide
gcacttacacttactttctc

SEQ ID NO: 944 - DNA, 20 bp, Artificial sequence
  Synthetic oligonucleotide
ccataatgtacctttcattt

SEQ ID NO: 945 - DNA, 20 bp, Artificial sequence
  Synthetic oligonucleotide
cttctttaacttccgtctcc

SEQ ID NO: 946 - DNA, 20 bp, Artificial sequence
  Synthetic oligonucleotide
gttcaaatttcactttcaac

SEQ ID NO: 947 - DNA, 20 bp, Artificial sequence
  Synthetic oligonucleotide
ccaacaatctttaaactgct

SEQ ID NO: 948 - DNA, 20 bp, Artificial sequence
  Synthetic oligonucleotide
ctttgcaaaatacttgagtc

SEQ ID NO: 949 - DNA, 20 bp, Artificial sequence
  Synthetic oligonucleotide
ccaaagaatctatacttata

SEQ ID NO: 950 - DNA, 20 bp, Artificial sequence
  Synthetic oligonucleotide
tctgtagcctatatcgggaa

SEQ ID NO: 951 - DNA, 20 bp, Artificial sequence
  Synthetic oligonucleotide
gctaacaacacctttccgtt

SEQ ID NO: 952 - DNA, 20 bp, Artificial sequence
  Synthetic oligonucleotide
ccagaccattattctgtgct

SEQ ID NO: 953 - DNA, 20 bp, Artificial sequence
  Synthetic oligonucleotide
gcaacaaatatctcatatac

SEQ ID NO: 954 - DNA, 20 bp, Artificial sequence
  Synthetic oligonucleotide
attcctgccagattcaccca

SEQ ID NO: 955 - DNA, 20 bp, Artificial sequence
  Synthetic oligonucleotide
tccttgctgcaattcctcta

SEQ ID NO: 956 - DNA, 20 bp, Artificial sequence
  Synthetic oligonucleotide
ataagctttcacattctcct

SEQ ID NO: 957 - DNA, 20 bp, Artificial sequence
  Synthetic oligonucleotide
ttgcccacaagccccctcat

SEQ ID NO: 958 - DNA, 20 bp, Artificial sequence
  Synthetic oligonucleotide
aacctaccttccaaccttta

SEQ ID NO: 959 - DNA, 20 bp, Artificial sequence
  Synthetic oligonucleotide
agcacttaatacatcatgcc

SEQ ID NO: 960 - DNA, 20 bp, Artificial sequence
  Synthetic oligonucleotide
gaactccataatttcaacat

SEQ ID NO: 961 - DNA, 20 bp, Artificial sequence
  Synthetic oligonucleotide
gtacacatatcataatgcac

SEQ ID NO: 962 - DNA, 20 bp, Artificial sequence
  Synthetic oligonucleotide
acatcactactataacctga

SEQ ID NO: 963 - DNA, 20 bp, Artificial sequence
  Synthetic oligonucleotide
gcatgccttatctttcctaa

SEQ ID NO: 964 - DNA, 20 bp, Artificial sequence
  Synthetic oligonucleotide
cacaaagcttgactatgcac

SEQ ID NO: 965 - DNA, 20 bp, Artificial sequence
  Synthetic oligonucleotide
cctccaccattttaaagttt

SEQ ID NO: 966 - DNA, 20 bp, Artificial sequence
  Synthetic oligonucleotide
gcagccaaagagcaaatcac

SEQ ID NO: 967 - DNA, 20 bp, Artificial sequence
  Synthetic oligonucleotide
tcatcatccaaaccatgtct

SEQ ID NO: 968 - DNA, 20 bp, Artificial sequence
  Synthetic oligonucleotide
taccatcctaagaaacttta

SEQ ID NO: 969 - DNA, 20 bp, Artificial sequence
  Synthetic oligonucleotide
agaagcagtacttatcattc

SEQ ID NO: 970 - DNA, 20 bp, Artificial sequence
  Synthetic oligonucleotide
ttcactgaatttcctacgga

SEQ ID NO: 971 - DNA, 20 bp, Artificial sequence
  Synthetic oligonucleotide
cacttacacttactttctcc

SEQ ID NO: 972 - DNA, 20 bp, Artificial sequence
  Synthetic oligonucleotide
gcaaaatacttgagtctctt

SEQ ID NO: 973 - DNA, 20 bp, Artificial sequence
  Synthetic oligonucleotide
aatctgcttcttattcagga

SEQ ID NO: 974 - DNA, 20 bp, Artificial sequence
  Synthetic oligonucleotide
gtggtactttatcataacca

SEQ ID NO: 975 - DNA, 20 bp, Artificial sequence
  Synthetic oligonucleotide
actgtatcatacttttactt

SEQ ID NO: 976 - DNA, 20 bp, Artificial sequence
  Synthetic oligonucleotide
caacaatctttaaactgctt

SEQ ID NO: 977 - DNA, 20 bp, Artificial sequence
  Synthetic oligonucleotide
cctctctgtttccaatagga

SEQ ID NO: 978 - DNA, 20 bp, Artificial sequence
  Synthetic oligonucleotide
ttctttaacttccgtctccc

SEQ ID NO: 979 - DNA, 20 bp, Artificial sequence
  Synthetic oligonucleotide
accatcctaagaaactttat

SEQ ID NO: 980 - DNA, 20 bp, Artificial sequence
  Synthetic oligonucleotide
gcagaactttttcatcagaa

SEQ ID NO: 981 - DNA, 20 bp, Artificial sequence
  Synthetic oligonucleotide
caggatatttcactcatatt

SEQ ID NO: 982 - DNA, 20 bp, Artificial sequence
  Synthetic oligonucleotide
tgccacttaaaatttgggtc

SEQ ID NO: 983 - DNA, 20 bp, Artificial sequence
  Synthetic oligonucleotide
gatccaaactgactgagatc

SEQ ID NO: 984 - DNA, 20 bp, Artificial sequence
  Synthetic oligonucleotide
ttcaaatttcactttcaacc

SEQ ID NO: 985 - DNA, 20 bp, Artificial sequence
  Synthetic oligonucleotide
tgcccacaagccccctcatc

SEQ ID NO: 986 - DNA, 20 bp, Artificial sequence
  Synthetic oligonucleotide
aggctgcactccctaaaaac

SEQ ID NO: 987 - DNA, 20 bp, Artificial sequence
  Synthetic oligonucleotide
tcaccaccaccttatttgcc

SEQ ID NO: 988 - DNA, 20 bp, Artificial sequence
  Synthetic oligonucleotide
gtcaaaccactttacctgtc

SEQ ID NO: 989 - DNA, 20 bp, Artificial sequence
  Synthetic oligonucleotide
tgcacacatttatcacctct

SEQ ID NO: 990 - DNA, 20 bp, Artificial sequence
  Synthetic oligonucleotide
ctggatttaatatattcctt

SEQ ID NO: 991 - DNA, 20 bp, Artificial sequence
  Synthetic oligonucleotide
cctgtcctgatactgtcaca

SEQ ID NO: 992 - DNA, 20 bp, Artificial sequence
  Synthetic oligonucleotide
gtactctgtcctttatatat

SEQ ID NO: 993 - DNA, 20 bp, Artificial sequence
  Synthetic oligonucleotide
tctagtcacccaatccagca

SEQ ID NO: 994 - DNA, 20 bp, Artificial sequence
  Synthetic oligonucleotide
gtatcatgattatcccatct

SEQ ID NO: 995 - DNA, 20 bp, Artificial sequence
  Synthetic oligonucleotide
tgttctcccagcaacacatc

SEQ ID NO: 996 - DNA, 20 bp, Artificial sequence
  Synthetic oligonucleotide
gctgcctaatcatatacata

SEQ ID NO: 997 - DNA, 20 bp, Artificial sequence
  Synthetic oligonucleotide
ccaagaatcccatgtggtaa

SEQ ID NO: 998 - DNA, 20 bp, Artificial sequence
  Synthetic oligonucleotide
aaccacactaatccttttac

SEQ ID NO: 999 - DNA, 20 bp, Artificial sequence
  Synthetic oligonucleotide
atagcttcacctttcacata

SEQ ID NO: 1000 - DNA, 20 bp, Artificial sequence
  Synthetic oligonucleotide
aagcaactaccaatgttcca

SEQ ID NO: 1001 - DNA, 20 bp, Artificial sequence
  Synthetic oligonucleotide
gctcaaaattttattcctta

SEQ ID NO: 1002 - DNA, 20 bp, Artificial sequence
  Synthetic oligonucleotide
acacctttattcctctgtgt

SEQ ID NO: 1003 - DNA, 20 bp, Artificial sequence
  Synthetic oligonucleotide
aatctactttcctacaagca

SEQ ID NO: 1004 - DNA, 20 bp, Artificial sequence
  Synthetic oligonucleotide
cagtttgcttcacaactccc

SEQ ID NO: 1005 - DNA, 20 bp, Artificial sequence
  Synthetic oligonucleotide
acttcatgattcccatggta

SEQ ID NO: 1006 - DNA, 20 bp, Artificial sequence
  Synthetic oligonucleotide
aatcgcagcagaattctttc

SEQ ID NO: 1007 - DNA, 20 bp, Artificial sequence
  Synthetic oligonucleotide
cttgctgcaattcctctagt

SEQ ID NO: 1008 - DNA, 20 bp, Artificial sequence
  Synthetic oligonucleotide
tccgctttttcctttaggga

SEQ ID NO: 1009 - DNA, 20 bp, Artificial sequence
  Synthetic oligonucleotide
caaacttttacctaatgtct

SEQ ID NO: 1010 - DNA, 20 bp, Artificial sequence
  Synthetic oligonucleotide
gactagctgctcccggagct

SEQ ID NO: 1011 - DNA, 20 bp, Artificial sequence
  Synthetic oligonucleotide
acctaccttccaacctttac

SEQ ID NO: 1012 - DNA, 20 bp, Artificial sequence
  Synthetic oligonucleotide
ctgttcatctttaccagctt

SEQ ID NO: 1013 - DNA, 20 bp, Artificial sequence
  Synthetic oligonucleotide
tgtccctaacattttcctta

SEQ ID NO: 1014 - DNA, 20 bp, Artificial sequence
  Synthetic oligonucleotide
ccagacatatatcataacca

SEQ ID NO: 1015 - DNA, 20 bp, Artificial sequence
  Synthetic oligonucleotide
tggacagtatcctctgggaa

SEQ ID NO: 1016 - DNA, 20 bp, Artificial sequence
  Synthetic oligonucleotide
ttactctctctgagtcctcc

SEQ ID NO: 1017 - DNA, 20 bp, Artificial sequence
  Synthetic oligonucleotide
acaccattcatttttagcct

SEQ ID NO: 1018 - DNA, 20 bp, Artificial sequence
  Synthetic oligonucleotide
attctagatactatcactcc

SEQ ID NO: 1019 - DNA, 20 bp, Artificial sequence
  Synthetic oligonucleotide
ctgttccaataactagcggc

SEQ ID NO: 1020 - DNA, 20 bp, Artificial sequence
  Synthetic oligonucleotide
cacaactcaccagagttgcc

SEQ ID NO: 1021 - DNA, 20 bp, Artificial sequence
  Synthetic oligonucleotide
agcaatttaaaccttacaac

SEQ ID NO: 1022 - DNA, 20 bp, Artificial sequence
  Synthetic oligonucleotide
atctcctcaaacggaagtac

SEQ ID NO: 1023 - DNA, 20 bp, Artificial sequence
  Synthetic oligonucleotide
gtgaaactttccccgatcac

SEQ ID NO: 1024 - DNA, 20 bp, Artificial sequence
  Synthetic oligonucleotide
ccataatgtttaattccaca

SEQ ID NO: 1025 - DNA, 20 bp, Artificial sequence
  Synthetic oligonucleotide
tcttaagatttatcaggtct

SEQ ID NO: 1026 - DNA, 20 bp, Artificial sequence
  Synthetic oligonucleotide
tatagcagttacataccttt

SEQ ID NO: 1027 - DNA, 20 bp, Artificial sequence
  Synthetic oligonucleotide
ctgttgacatcatacacact

SEQ ID NO: 1028 - DNA, 20 bp, Artificial sequence
  Synthetic oligonucleotide
gattttctatctgaccaaac

SEQ ID NO: 1029 - DNA, 20 bp, Artificial sequence
  Synthetic oligonucleotide
ctgatgaaatactcaagtgt

SEQ ID NO: 1030 - DNA, 20 bp, Artificial sequence
  Synthetic oligonucleotide
agctgtttaaaattcctgta

SEQ ID NO: 1031 - DNA, 20 bp, Artificial sequence
  Synthetic oligonucleotide
atatccttttgccaccaggc

SEQ ID NO: 1032 - DNA, 20 bp, Artificial sequence
  Synthetic oligonucleotide
aagaatctatacttatatcc

SEQ ID NO: 1033 - DNA, 20 bp, Artificial sequence
  Synthetic oligonucleotide
taagaatctttctttgcaac

SEQ ID NO: 1034 - DNA, 20 bp, Artificial sequence
  Synthetic oligonucleotide
tcctgccagattcacccagt

SEQ ID NO: 1035 - DNA, 20 bp, Artificial sequence
  Synthetic oligonucleotide
atgatggtaatcaatgcaac

SEQ ID NO: 1036 - DNA, 20 bp, Artificial sequence
  Synthetic oligonucleotide
aagagcaaatcacaggcttc

SEQ ID NO: 1037 - DNA, 20 bp, Artificial sequence
  Synthetic oligonucleotide
ccttccagctcttttgactt

SEQ ID NO: 1038 - DNA, 20 bp, Artificial sequence
  Synthetic oligonucleotide
agcagagcactttatgtctt

SEQ ID NO: 1039 - DNA, 20 bp, Artificial sequence
  Synthetic oligonucleotide
gaactgcacaatatgactgc

SEQ ID NO: 1040 - DNA, 20 bp, Artificial sequence
  Synthetic oligonucleotide
ctttcgactcgaattctgtc

SEQ ID NO: 1041 - DNA, 20 bp, Artificial sequence
  Synthetic oligonucleotide
tctctgctatacaacaagct

SEQ ID NO: 1042 - DNA, 20 bp, Artificial sequence
  Synthetic oligonucleotide
ttgggaattatattctgcca

SEQ ID NO: 1043 - DNA, 20 bp, Artificial sequence
  Synthetic oligonucleotide
gacccatattttcctaacac

SEQ ID NO: 1044 - DNA, 20 bp, Artificial sequence
  Synthetic oligonucleotide
actccataatttcaacatac

SEQ ID NO: 1045 - DNA, 20 bp, Artificial sequence
  Synthetic oligonucleotide
tgcttatgtacacttaagta

SEQ ID NO: 1046 - DNA, 20 bp, Artificial sequence
  Synthetic oligonucleotide
aactgcacaatatgactgct

SEQ ID NO: 1047 - DNA, 20 bp, Artificial sequence
  Synthetic oligonucleotide
tcaccatcacaccatattca

SEQ ID NO: 1048 - DNA, 20 bp, Artificial sequence
  Synthetic oligonucleotide
ttgctgcaattcctctagtt

SEQ ID NO: 1049 - DNA, 20 bp, Artificial sequence
  Synthetic oligonucleotide
gcccacaagccccctcatca

SEQ ID NO: 1050 - DNA, 20 bp, Artificial sequence
  Synthetic oligonucleotide
caccattcatttttagcctt

SEQ ID NO: 1051 - DNA, 20 bp, Artificial sequence
  Synthetic oligonucleotide
tcaaccttcttgactagggc

SEQ ID NO: 1052 - DNA, 20 bp, Artificial sequence
  Synthetic oligonucleotide
tgttcatctttaccagcttc

SEQ ID NO: 1053 - DNA, 20 bp, Artificial sequence
  Synthetic oligonucleotide
aacggaagtactaaaacctc

SEQ ID NO: 1054 - DNA, 20 bp, Artificial sequence
  Synthetic oligonucleotide
ccatcctaagaaactttatc

SEQ ID NO: 1055 - DNA, 20 bp, Artificial sequence
  Synthetic oligonucleotide
tgggaattatattctgccac

SEQ ID NO: 1056 - DNA, 20 bp, Artificial sequence
  Synthetic oligonucleotide
atcttatgcaaatatctcat

SEQ ID NO: 1057 - DNA, 20 bp, Artificial sequence
  Synthetic oligonucleotide
tgaaactttccccgatcacc

SEQ ID NO: 1058 - DNA, 20 bp, Artificial sequence
  Synthetic oligonucleotide
tctctgagtcctcctgaaaa

SEQ ID NO: 1059 - DNA, 20 bp, Artificial sequence
  Synthetic oligonucleotide
ctagtcacccaatccagcac

SEQ ID NO: 1060 - DNA, 20 bp, Artificial sequence
  Synthetic oligonucleotide
aatctttaaactgcttaatc

SEQ ID NO: 1061 - DNA, 20 bp, Artificial sequence
  Synthetic oligonucleotide
ctgttcctaatacttcatta

SEQ ID NO: 1062 - DNA, 20 bp, Artificial sequence
  Synthetic oligonucleotide
tggtactttatcataaccat

SEQ ID NO: 1063 - DNA, 20 bp, Artificial sequence
  Synthetic oligonucleotide
agtttgcttcacaactccca

SEQ ID NO: 1064 - DNA, 20 bp, Artificial sequence
  Synthetic oligonucleotide
tagtttccttatcccaacat

SEQ ID NO: 1065 - DNA, 20 bp, Artificial sequence
  Synthetic oligonucleotide
atagcagttacatacctttt

SEQ ID NO: 1066 - DNA, 20 bp, Artificial sequence
  Synthetic oligonucleotide
gtatcatacttttactttac

SEQ ID NO: 1067 - DNA, 20 bp, Artificial sequence
  Synthetic oligonucleotide
ccggagctgattcagatgtc

SEQ ID NO: 1068 - DNA, 20 bp, Artificial sequence
  Synthetic oligonucleotide
acttacacttactttctcca

SEQ ID NO: 1069 - DNA, 20 bp, Artificial sequence
  Synthetic oligonucleotide
cctgccagattcacccagtt

SEQ ID NO: 1070 - DNA, 20 bp, Artificial sequence
  Synthetic oligonucleotide
gcatagtcccattttaactt

SEQ ID NO: 1071 - DNA, 20 bp, Artificial sequence
  Synthetic oligonucleotide
tggctactttttcaaagttc

SEQ ID NO: 1072 - DNA, 20 bp, Artificial sequence
  Synthetic oligonucleotide
gcacacatttatcacctctt

SEQ ID NO: 1073 - DNA, 20 bp, Artificial sequence
  Synthetic oligonucleotide
tgcctaatcatatacatatc

SEQ ID NO: 1074 - DNA, 20 bp, Artificial sequence
  Synthetic oligonucleotide
agagcttctatactaacttc

SEQ ID NO: 1075 - DNA, 20 bp, Artificial sequence
  Synthetic oligonucleotide
gtccctaacattttccttat

SEQ ID NO: 1076 - DNA, 20 bp, Artificial sequence
  Synthetic oligonucleotide
gcaaatcacaggcttctcta

SEQ ID NO: 1077 - DNA, 20 bp, Artificial sequence
  Synthetic oligonucleotide
atgaaatactcaagtgtagc

SEQ ID NO: 1078 - DNA, 20 bp, Artificial sequence
  Synthetic oligonucleotide
agttgccagacattcccaga

SEQ ID NO: 1079 - DNA, 20 bp, Artificial sequence
  Synthetic oligonucleotide
gttctcccagcaacacatca

SEQ ID NO: 1080 - DNA, 20 bp, Artificial sequence
  Synthetic oligonucleotide
cctgtgttttacctttccat

SEQ ID NO: 1081 - DNA, 20 bp, Artificial sequence
  Synthetic oligonucleotide
aagcataatatcctaccaat

SEQ ID NO: 1082 - DNA, 20 bp, Artificial sequence
  Synthetic oligonucleotide
tgactgagatcaaaaagtgt

SEQ ID NO: 1083 - DNA, 20 bp, Artificial sequence
  Synthetic oligonucleotide
cagtacttatcattctagta

SEQ ID NO: 1084 - DNA, 20 bp, Artificial sequence
  Synthetic oligonucleotide
tctttaacttccgtctccca

SEQ ID NO: 1085 - DNA, 20 bp, Artificial sequence
  Synthetic oligonucleotide
tggtaacactttctttgtat

SEQ ID NO: 1086 - DNA, 20 bp, Artificial sequence
  Synthetic oligonucleotide
atacaacttactcaatccac

SEQ ID NO: 1087 - DNA, 20 bp, Artificial sequence
  Synthetic oligonucleotide
gcatctagaacatattcatt

SEQ ID NO: 1088 - DNA, 20 bp, Artificial sequence
  Synthetic oligonucleotide
tctgtcctttatatatattg

SEQ ID NO: 1089 - DNA, 20 bp, Artificial sequence
  Synthetic oligonucleotide
cccatattttcctaacactc

SEQ ID NO: 1090 - DNA, 20 bp, Artificial sequence
  Synthetic oligonucleotide
aggatatttcactcatattc

SEQ ID NO: 1091 - DNA, 20 bp, Artificial sequence
  Synthetic oligonucleotide
tcggtattatattccagtga

SEQ ID NO: 1092 - DNA, 20 bp, Artificial sequence
  Synthetic oligonucleotide
ttgttttctacacttagcca

SEQ ID NO: 1093 - DNA, 20 bp, Artificial sequence
  Synthetic oligonucleotide
taccaatgttccatcatcac

SEQ ID NO: 1094 - DNA, 20 bp, Artificial sequence
  Synthetic oligonucleotide
caggcacctttcttatggca

SEQ ID NO: 1095 - DNA, 20 bp, Artificial sequence
  Synthetic oligonucleotide
ttttctatctgaccaaacac

SEQ ID NO: 1096 - DNA, 20 bp, Artificial sequence
  Synthetic oligonucleotide
ccgctttttcctttagggaa

SEQ ID NO: 1097 - DNA, 20 bp, Artificial sequence
  Synthetic oligonucleotide
gtctctttattcctactact

SEQ ID NO: 1098 - DNA, 20 bp, Artificial sequence
  Synthetic oligonucleotide
cctaccttccaacctttacc

SEQ ID NO: 1099 - DNA, 20 bp, Artificial sequence
  Synthetic oligonucleotide
acataagtccttcaccagct

SEQ ID NO: 1100 - DNA, 20 bp, Artificial sequence
  Synthetic oligonucleotide
aatgcaacttgttttatgta

SEQ ID NO: 1101 - DNA, 20 bp, Artificial sequence
  Synthetic oligonucleotide
tatcatgattatcccatctt

SEQ ID NO: 1102 - DNA, 20 bp, Artificial sequence
  Synthetic oligonucleotide
atcgcagcagaattctttca

SEQ ID NO: 1103 - DNA, 20 bp, Artificial sequence
  Synthetic oligonucleotide
gagctgctttcttcaaaatt

SEQ ID NO: 1104 - DNA, 20 bp, Artificial sequence
  Synthetic oligonucleotide
tctggacatatctttggaca

SEQ ID NO: 1105 - DNA, 20 bp, Artificial sequence
  Synthetic oligonucleotide
tttcgactcgaattctgtca

SEQ ID NO: 1106 - DNA, 20 bp, Artificial sequence
  Synthetic oligonucleotide
tcactgaatttcctacggaa

SEQ ID NO: 1107 - DNA, 20 bp, Artificial sequence
  Synthetic oligonucleotide
cgtacatgaacaaacagtct

SEQ ID NO: 1108 - DNA, 20 bp, Artificial sequence
  Synthetic oligonucleotide
cttcacctttcacatacacc

SEQ ID NO: 1109 - DNA, 20 bp, Artificial sequence
  Synthetic oligonucleotide
tctagatactatcactccaa

SEQ ID NO: 1110 - DNA, 20 bp, Artificial sequence
  Synthetic oligonucleotide
gtgcattactcataaagcaa

SEQ ID NO: 1111 - DNA, 20 bp, Artificial sequence
  Synthetic oligonucleotide
ggctgcactccctaaaaaca

SEQ ID NO: 1112 - DNA, 20 bp, Artificial sequence
  Synthetic oligonucleotide
accacactaatccttttaca

SEQ ID NO: 1113 - DNA, 20 bp, Artificial sequence
  Synthetic oligonucleotide
gaatctatacttatatccac

SEQ ID NO: 1114 - DNA, 20 bp, Artificial sequence
  Synthetic oligonucleotide
tggtcttttatcattagcca

SEQ ID NO: 1115 - DNA, 20 bp, Artificial sequence
  Synthetic oligonucleotide
gccgagtaattcattctctc

SEQ ID NO: 1116 - DNA, 20 bp, Artificial sequence
  Synthetic oligonucleotide
catgtggtaattccccacct

SEQ ID NO: 1117 - DNA, 20 bp, Artificial sequence
  Synthetic oligonucleotide
agggtgatactctaattctt

SEQ ID NO: 1118 - DNA, 20 bp, Artificial sequence
  Synthetic oligonucleotide
ggtcaaaactccttccactc

SEQ ID NO: 1119 - DNA, 20 bp, Artificial sequence
  Synthetic oligonucleotide
gcataacacagacttacttt

SEQ ID NO: 1120 - DNA, 20 bp, Artificial sequence
  Synthetic oligonucleotide
tctctgtttccaataggaat

SEQ ID NO: 1121 - DNA, 20 bp, Artificial sequence
  Synthetic oligonucleotide
ctgcaggaatatttcatacc

SEQ ID NO: 1122 - DNA, 20 bp, Artificial sequence
  Synthetic oligonucleotide
ctgtcctgatactgtcacat

SEQ ID NO: 1123 - DNA, 20 bp, Artificial sequence
  Synthetic oligonucleotide
tgctgcaattcctctagtta

SEQ ID NO: 1124 - DNA, 20 bp, Artificial sequence
  Synthetic oligonucleotide
ccatattttcctaacactcc

SEQ ID NO: 1125 - DNA, 20 bp, Artificial sequence
  Synthetic oligonucleotide
gagcttctatactaacttca

SEQ ID NO: 1126 - DNA, 20 bp, Artificial sequence
  Synthetic oligonucleotide
catcctaagaaactttatcc

SEQ ID NO: 1127 - DNA, 20 bp, Artificial sequence
  Synthetic oligonucleotide
gctgctttcttcaaaatttc

SEQ ID NO: 1128 - DNA, 20 bp, Artificial sequence
  Synthetic oligonucleotide
tgcaaaggcatctctgattc

SEQ ID NO: 1129 - DNA, 20 bp, Artificial sequence
  Synthetic oligonucleotide
gatactgtcacatattgtgc

SEQ ID NO: 1130 - DNA, 20 bp, Artificial sequence
  Synthetic oligonucleotide
tgagtacctttatttctaca

SEQ ID NO: 1131 - DNA, 20 bp, Artificial sequence
  Synthetic oligonucleotide
tagtcacccaatccagcact

SEQ ID NO: 1132 - DNA, 20 bp, Artificial sequence
  Synthetic oligonucleotide
ccacactaatccttttacat

SEQ ID NO: 1133 - DNA, 20 bp, Artificial sequence
  Synthetic oligonucleotide
atgcagtaattcaatatcct

SEQ ID NO: 1134 - DNA, 20 bp, Artificial sequence
  Synthetic oligonucleotide
agcagttacataccttttga

SEQ ID NO: 1135 - DNA, 20 bp, Artificial sequence
  Synthetic oligonucleotide
gttgccagacattcccagat

SEQ ID NO: 1136 - DNA, 20 bp, Artificial sequence
  Synthetic oligonucleotide
tgccagattcacccagttgc

SEQ ID NO: 1137 - DNA, 20 bp, Artificial sequence
  Synthetic oligonucleotide
tatgtaggagctctttccac

SEQ ID NO: 1138 - DNA, 20 bp, Artificial sequence
  Synthetic oligonucleotide
cctgtgaattttctagccac

SEQ ID NO: 1139 - DNA, 20 bp, Artificial sequence
  Synthetic oligonucleotide
tatattctgccacttaaggc

SEQ ID NO: 1140 - DNA, 20 bp, Artificial sequence
  Synthetic oligonucleotide
cacacagtatcatttaaggc

SEQ ID NO: 1141 - DNA, 20 bp, Artificial sequence
  Synthetic oligonucleotide
acggaagtactaaaacctca

SEQ ID NO: 1142 - DNA, 20 bp, Artificial sequence
  Synthetic oligonucleotide
tctctcatataatccttcct

SEQ ID NO: 1143 - DNA, 20 bp, Artificial sequence
  Synthetic oligonucleotide
gagactttttaccctttact

SEQ ID NO: 1144 - DNA, 20 bp, Artificial sequence
  Synthetic oligonucleotide
atctttaaactgcttaatcc

SEQ ID NO: 1145 - DNA, 20 bp, Artificial sequence
  Synthetic oligonucleotide
gcacagaagatagctggtag

SEQ ID NO: 1146 - DNA, 20 bp, Artificial sequence
  Synthetic oligonucleotide
gtggtaattccccacctggt

SEQ ID NO: 1147 - DNA, 20 bp, Artificial sequence
  Synthetic oligonucleotide
cggcaaactatccataggtt

SEQ ID NO: 1148 - DNA, 20 bp, Artificial sequence
  Synthetic oligonucleotide
atcacaggcttctctaagtt

SEQ ID NO: 1149 - DNA, 20 bp, Artificial sequence
  Synthetic oligonucleotide
ttccaataggaatataccat

SEQ ID NO: 1150 - DNA, 20 bp, Artificial sequence
  Synthetic oligonucleotide
tacaacttactcaatccaca

SEQ ID NO: 1151 - DNA, 20 bp, Artificial sequence
  Synthetic oligonucleotide
tttctatctgaccaaacaca

SEQ ID NO: 1152 - DNA, 20 bp, Artificial sequence
  Synthetic oligonucleotide
tgcaaatatctcattctgct

SEQ ID NO: 1153 - DNA, 20 bp, Artificial sequence
  Synthetic oligonucleotide
atagaattttccccactggt

SEQ ID NO: 1154 - DNA, 20 bp, Artificial sequence
  Synthetic oligonucleotide
caggaaggactccatgatta

SEQ ID NO: 1155 - DNA, 20 bp, Artificial sequence
  Synthetic oligonucleotide
actgcacaatatgactgctt

SEQ ID NO: 1156 - DNA, 20 bp, Artificial sequence
  Synthetic oligonucleotide
gcatataacacattttaggt

SEQ ID NO: 1157 - DNA, 20 bp, Artificial sequence
  Synthetic oligonucleotide
ctgtcctttatatatattgt

SEQ ID NO: 1158 - DNA, 20 bp, Artificial sequence
  Synthetic oligonucleotide
aaagacttccatttagagca

SEQ ID NO: 1159 - DNA, 20 bp, Artificial sequence
  Synthetic oligonucleotide
aatctatacttatatccaca

SEQ ID NO: 1160 - DNA, 20 bp, Artificial sequence
  Synthetic oligonucleotide
gatgaaactttcatatccct

SEQ ID NO: 1161 - DNA, 20 bp, Artificial sequence
  Synthetic oligonucleotide
gcataatatcctaccaatga

SEQ ID NO: 1162 - DNA, 20 bp, Artificial sequence
  Synthetic oligonucleotide
gatgtgccaacttacctaac

SEQ ID NO: 1163 - DNA, 20 bp, Artificial sequence
  Synthetic oligonucleotide
gtcaaaaccatcaacttact

SEQ ID NO: 1164 - DNA, 20 bp, Artificial sequence
  Synthetic oligonucleotide
caatggcaattccatcatga

SEQ ID NO: 1165 - DNA, 20 bp, Artificial sequence
  Synthetic oligonucleotide
accatcacaccatattcact

SEQ ID NO: 1166 - DNA, 20 bp, Artificial sequence
  Synthetic oligonucleotide
gtgtaagactcattcaacat

SEQ ID NO: 1167 - DNA, 20 bp, Artificial sequence
  Synthetic oligonucleotide
gctgcactccctaaaaacaa

SEQ ID NO: 1168 - DNA, 20 bp, Artificial sequence
  Synthetic oligonucleotide
tcgcagcagaattctttcaa

SEQ ID NO: 1169 - DNA, 20 bp, Artificial sequence
  Synthetic oligonucleotide
gaaactttccccgatcacct

SEQ ID NO: 1170 - DNA, 20 bp, Artificial sequence
  Synthetic oligonucleotide
tgtgttttacctttccatca

SEQ ID NO: 1171 - DNA, 20 bp, Artificial sequence
  Synthetic oligonucleotide
aagcaatttaatcacccaca

SEQ ID NO: 1172 - DNA, 20 bp, Artificial sequence
  Synthetic oligonucleotide
ctttaacttccgtctcccaa

SEQ ID NO: 1173 - DNA, 20 bp, Artificial sequence
  Synthetic oligonucleotide
tctgagtcctcctgaaaatt

SEQ ID NO: 1174 - DNA, 20 bp, Artificial sequence
  Synthetic oligonucleotide
aagacactatattttcacct

SEQ ID NO: 1175 - DNA, 20 bp, Artificial sequence
  Synthetic oligonucleotide
cgagtaattcattctctcct

SEQ ID NO: 1176 - DNA, 20 bp, Artificial sequence
  Synthetic oligonucleotide
gagtaggtatacttgctgtc

SEQ ID NO: 1177 - DNA, 20 bp, Artificial sequence
  Synthetic oligonucleotide
gtctgtaattttctacaata

SEQ ID NO: 1178 - DNA, 20 bp, Artificial sequence
  Synthetic oligonucleotide
gaggaacttctatacatctc

SEQ ID NO: 1179 - DNA, 20 bp, Artificial sequence
  Synthetic oligonucleotide
gcagtacactcatctcttcc

SEQ ID NO: 1180 - DNA, 20 bp, Artificial sequence
  Synthetic oligonucleotide
gtactttatcataaccatac

SEQ ID NO: 1181 - DNA, 20 bp, Artificial sequence
  Synthetic oligonucleotide
ttctcccagcaacacatcaa

SEQ ID NO: 1182 - DNA, 20 bp, Artificial sequence
  Synthetic oligonucleotide
agtcaagataactacatcaa

SEQ ID NO: 1183 - DNA, 20 bp, Artificial sequence
  Synthetic oligonucleotide
gcacccattccataccacat

SEQ ID NO: 1184 - DNA, 20 bp, Artificial sequence
  Synthetic oligonucleotide
acacacagtaaccatccaac

SEQ ID NO: 1185 - DNA, 20 bp, Artificial sequence
  Synthetic oligonucleotide
tgcaggaatatttcatacct

SEQ ID NO: 1186 - DNA, 20 bp, Artificial sequence
  Synthetic oligonucleotide
gatactctaattcttgtcat

SEQ ID NO: 1187 - DNA, 20 bp, Artificial sequence
  Synthetic oligonucleotide
ctaccttccaacctttaccc

SEQ ID NO: 1188 - DNA, 20 bp, Artificial sequence
  Synthetic oligonucleotide
ccaaccatacagattgatct

SEQ ID NO: 1189 - DNA, 20 bp, Artificial sequence
  Synthetic oligonucleotide
actgaatttcctacggaagc

SEQ ID NO: 1190 - DNA, 20 bp, Artificial sequence
  Synthetic oligonucleotide
gcctaatcatatacatatca

SEQ ID NO: 1191 - DNA, 20 bp, Artificial sequence
  Synthetic oligonucleotide
catgattatcccatcttgca

SEQ ID NO: 1192 - DNA, 20 bp, Artificial sequence
  Synthetic oligonucleotide
acaagccccctcatcagaat

SEQ ID NO: 1193 - DNA, 20 bp, Artificial sequence
  Synthetic oligonucleotide
gtttgcttcacaactcccac

SEQ ID NO: 1194 - DNA, 20 bp, Artificial sequence
  Synthetic oligonucleotide
ttcacctttcacatacacca

SEQ ID NO: 1195 - DNA, 20 bp, Artificial sequence
  Synthetic oligonucleotide
ctaacaagcctcctttggct

SEQ ID NO: 1196 - DNA, 20 bp, Artificial sequence
  Synthetic oligonucleotide
attggaatctcttcctggtc

SEQ ID NO: 1197 - DNA, 20 bp, Artificial sequence
  Synthetic oligonucleotide
ttcgactcgaattctgtcat

SEQ ID NO: 1198 - DNA, 20 bp, Artificial sequence
  Synthetic oligonucleotide
ttcactcatattcctaacac

SEQ ID NO: 1199 - DNA, 20 bp, Artificial sequence
  Synthetic oligonucleotide
gcagccacttttctactaca

SEQ ID NO: 1200 - DNA, 20 bp, Artificial sequence
  Synthetic oligonucleotide
aagtactaaaacctcagcgc

SEQ ID NO: 1201 - DNA, 20 bp, Artificial sequence
  Synthetic oligonucleotide
atgtaacacttttagggtcc

SEQ ID NO: 1202 - DNA, 20 bp, Artificial sequence
  Synthetic oligonucleotide
atattctgccacttaaggct

SEQ ID NO: 1203 - DNA, 20 bp, Artificial sequence
  Synthetic oligonucleotide
tttgcagtatcacctgtact

SEQ ID NO: 1204 - DNA, 20 bp, Artificial sequence
  Synthetic oligonucleotide
atgtaggagctctttccacc

SEQ ID NO: 1205 - DNA, 20 bp, Artificial sequence
  Synthetic oligonucleotide
tttgcttcacaactcccacc

SEQ ID NO: 1206 - DNA, 20 bp, Artificial sequence
  Synthetic oligonucleotide
gactcattttcttcccaccc

SEQ ID NO: 1207 - DNA, 20 bp, Artificial sequence
  Synthetic oligonucleotide
aaaccatcaacttactagct

SEQ ID NO: 1208 - DNA, 20 bp, Artificial sequence
  Synthetic oligonucleotide
gggcactaatcactttatca

SEQ ID NO: 1209 - DNA, 20 bp, Artificial sequence
  Synthetic oligonucleotide
cttctatactaacttcaggc

SEQ ID NO: 1210 - DNA, 20 bp, Artificial sequence
  Synthetic oligonucleotide
actttccccgatcacctggt

SEQ ID NO: 1211 - DNA, 20 bp, Artificial sequence
  Synthetic oligonucleotide
tgcactccctaaaaacaaat

SEQ ID NO: 1212 - DNA, 20 bp, Artificial sequence
  Synthetic oligonucleotide
gcttcagaatcacaatggtt

SEQ ID NO: 1213 - DNA, 20 bp, Artificial sequence
  Synthetic oligonucleotide
ggcaaactatccataggtta

SEQ ID NO: 1214 - DNA, 20 bp, Artificial sequence
  Synthetic oligonucleotide
atggcaattccatcatgagt

SEQ ID NO: 1215 - DNA, 20 bp, Artificial sequence
  Synthetic oligonucleotide
gcatcaaataacacactgca

SEQ ID NO: 1216 - DNA, 20 bp, Artificial sequence
  Synthetic oligonucleotide
cagatctgtttttatctgct

SEQ ID NO: 1217 - DNA, 20 bp, Artificial sequence
  Synthetic oligonucleotide
gcatgtcttcacttattctc

SEQ ID NO: 1218 - DNA, 20 bp, Artificial sequence
  Synthetic oligonucleotide
cagccacttttctactacat

SEQ ID NO: 1219 - DNA, 20 bp, Artificial sequence
  Synthetic oligonucleotide
gagtaattcattctctcctc

SEQ ID NO: 1220 - DNA, 20 bp, Artificial sequence
  Synthetic oligonucleotide
ccaggaacatctgctagttt

SEQ ID NO: 1221 - DNA, 20 bp, Artificial sequence
  Synthetic oligonucleotide
atactgtcacatattgtgca

SEQ ID NO: 1222 - DNA, 20 bp, Artificial sequence
  Synthetic oligonucleotide
gcaacgatatcctttcttac

SEQ ID NO: 1223 - DNA, 20 bp, Artificial sequence
  Synthetic oligonucleotide
gcaaatatctcattctgcta

SEQ ID NO: 1224 - DNA, 20 bp, Artificial sequence
  Synthetic oligonucleotide
ctgcacaatatgactgcttt

SEQ ID NO: 1225 - DNA, 20 bp, Artificial sequence
  Synthetic oligonucleotide
ttgccagacattcccagatc

SEQ ID NO: 1226 - DNA, 20 bp, Artificial sequence
  Synthetic oligonucleotide
acactatattttcacctgta

SEQ ID NO: 1227 - DNA, 20 bp, Artificial sequence
  Synthetic oligonucleotide
ttttaggtatccattcttca

SEQ ID NO: 1228 - DNA, 20 bp, Artificial sequence
  Synthetic oligonucleotide
tctcccagcaacacatcaat

SEQ ID NO: 1229 - DNA, 20 bp, Artificial sequence
  Synthetic oligonucleotide
cagtacactcatctcttccc

SEQ ID NO: 1230 - DNA, 20 bp, Artificial sequence
  Synthetic oligonucleotide
gctgcaattcctctagttat

SEQ ID NO: 1231 - DNA, 20 bp, Artificial sequence
  Synthetic oligonucleotide
cctcaatgttacactatttc

SEQ ID NO: 1232 - DNA, 20 bp, Artificial sequence
  Synthetic oligonucleotide
gtgtattaataatttatcct

SEQ ID NO: 1233 - DNA, 20 bp, Artificial sequence
  Synthetic oligonucleotide
gccagattcacccagttgcc

SEQ ID NO: 1234 - DNA, 20 bp, Artificial sequence
  Synthetic oligonucleotide
agtcacccaatccagcactt

SEQ ID NO: 1235 - DNA, 20 bp, Artificial sequence
  Synthetic oligonucleotide
attccaactctatttgcata

SEQ ID NO: 1236 - DNA, 20 bp, Artificial sequence
  Synthetic oligonucleotide
gtgaccacacttcctggaat

SEQ ID NO: 1237 - DNA, 20 bp, Artificial sequence
  Synthetic oligonucleotide
gtcctcctgaaaattagaaa

SEQ ID NO: 1238 - DNA, 20 bp, Artificial sequence
  Synthetic oligonucleotide
gtaaccacatttctgaactt

SEQ ID NO: 1239 - DNA, 20 bp, Artificial sequence
  Synthetic oligonucleotide
gagtatcattcactattgcc

SEQ ID NO: 1240 - DNA, 20 bp, Artificial sequence
  Synthetic oligonucleotide
gagtacctttatttctacat

SEQ ID NO: 1241 - DNA, 20 bp, Artificial sequence
  Synthetic oligonucleotide
gcagttacataccttttgat

SEQ ID NO: 1242 - DNA, 20 bp, Artificial sequence
  Synthetic oligonucleotide
acagaagatagctggtagaa

SEQ ID NO: 1243 - DNA, 20 bp, Artificial sequence
  Synthetic oligonucleotide
ttctatctgaccaaacacac

SEQ ID NO: 1244 - DNA, 20 bp, Artificial sequence
  Synthetic oligonucleotide
cgcagcagaattctttcaat

SEQ ID NO: 1245 - DNA, 20 bp, Artificial sequence
  Synthetic oligonucleotide
gatgcataatgactaacaca

SEQ ID NO: 1246 - DNA, 20 bp, Artificial sequence
  Synthetic oligonucleotide
ccaataggaatataccatgg

SEQ ID NO: 1247 - DNA, 20 bp, Artificial sequence
  Synthetic oligonucleotide
tcacctttcacatacaccat

SEQ ID NO: 1248 - DNA, 20 bp, Artificial sequence
  Synthetic oligonucleotide
gcagtaattcaatatccttt

SEQ ID NO: 1249 - DNA, 20 bp, Artificial sequence
  Synthetic oligonucleotide
agctgaagtatcattaactc

SEQ ID NO: 1250 - DNA, 20 bp, Artificial sequence
  Synthetic oligonucleotide
acaacttactcaatccacat

SEQ ID NO: 1251 - DNA, 20 bp, Artificial sequence
  Synthetic oligonucleotide
aaggactccatgattagtca

SEQ ID NO: 1252 - DNA, 20 bp, Artificial sequence
  Synthetic oligonucleotide
taccttccaacctttaccca

SEQ ID NO: 1253 - DNA, 20 bp, Artificial sequence
  Synthetic oligonucleotide
gtcttctaataattctctca

SEQ ID NO: 1254 - DNA, 20 bp, Artificial sequence
  Synthetic oligonucleotide
gccccctcatcagaatggga

SEQ ID NO: 1255 - DNA, 20 bp, Artificial sequence
  Synthetic oligonucleotide
ctagcattttttattagtca

SEQ ID NO: 1256 - DNA, 20 bp, Artificial sequence
  Synthetic oligonucleotide
tcgactcgaattctgtcatc

SEQ ID NO: 1257 - DNA, 20 bp, Artificial sequence
  Synthetic oligonucleotide
aaactgcttaatcctatgac

SEQ ID NO: 1258 - DNA, 20 bp, Artificial sequence
  Synthetic oligonucleotide
acattctttaattatggtcc

SEQ ID NO: 1259 - DNA, 20 bp, Artificial sequence
  Synthetic oligonucleotide
tggtaattccccacctggtg

SEQ ID NO: 1260 - DNA, 20 bp, Artificial sequence
  Synthetic oligonucleotide
tcacaggcttctctaagtta

SEQ ID NO: 1261 - DNA, 20 bp, Artificial sequence
  Synthetic oligonucleotide
ctctcatataatccttcctt

SEQ ID NO: 1262 - DNA, 20 bp, Artificial sequence
  Synthetic oligonucleotide
tcaccttgtttactattact

SEQ ID NO: 1263 - DNA, 20 bp, Artificial sequence
  Synthetic oligonucleotide
atgtgccaacttacctaaca

SEQ ID NO: 1264 - DNA, 20 bp, Artificial sequence
  Synthetic oligonucleotide
catgcatctaatttctctcc

SEQ ID NO: 1265 - DNA, 20 bp, Artificial sequence
  Synthetic oligonucleotide
ccatcacaccatattcactc

SEQ ID NO: 1266 - DNA, 20 bp, Artificial sequence
  Synthetic oligonucleotide
gtaggtatacttgctgtcat

SEQ ID NO: 1267 - DNA, 20 bp, Artificial sequence
  Synthetic oligonucleotide
aagcaatcactttatcagct

SEQ ID NO: 1268 - DNA, 20 bp, Artificial sequence
  Synthetic oligonucleotide
aggaatatttcatacctgga

SEQ ID NO: 1269 - DNA, 20 bp, Artificial sequence
  Synthetic oligonucleotide
cctttatatatattgtctgc

SEQ ID NO: 1270 - DNA, 20 bp, Artificial sequence
  Synthetic oligonucleotide
tgagcatcatcatattagcc

SEQ ID NO: 1271 - DNA, 20 bp, Artificial sequence
  Synthetic oligonucleotide
aggaacttctatacatctca

SEQ ID NO: 1272 - DNA, 20 bp, Artificial sequence
  Synthetic oligonucleotide
ctatacttatatccacattc

SEQ ID NO: 1273 - DNA, 20 bp, Artificial sequence
  Synthetic oligonucleotide
gttcatttatacatagagca

SEQ ID NO: 1274 - DNA, 20 bp, Artificial sequence
  Synthetic oligonucleotide
atcctaagaaactttatcca

SEQ ID NO: 1275 - DNA, 20 bp, Artificial sequence
  Synthetic oligonucleotide
taacttcttatttctgcatc

SEQ ID NO: 1276 - DNA, 20 bp, Artificial sequence
  Synthetic oligonucleotide
ttaacttccgtctcccaaat

SEQ ID NO: 1277 - DNA, 20 bp, Artificial sequence
  Synthetic oligonucleotide
tagcaccaattccacatttc

SEQ ID NO: 1278 - DNA, 20 bp, Artificial sequence
  Synthetic oligonucleotide
ctaccagctactcttatggc

SEQ ID NO: 1279 - DNA, 20 bp, Artificial sequence
  Synthetic oligonucleotide
actgtcacataacctccaca

SEQ ID NO: 1280 - DNA, 20 bp, Artificial sequence
  Synthetic oligonucleotide
ttgcttcacaactcccacct

SEQ ID NO: 1281 - DNA, 20 bp, Artificial sequence
  Synthetic oligonucleotide
cactatattttcacctgtac

SEQ ID NO: 1282 - DNA, 20 bp, Artificial sequence
  Synthetic oligonucleotide
cgactcgaattctgtcatcc

SEQ ID NO: 1283 - DNA, 20 bp, Artificial sequence
  Synthetic oligonucleotide
cttgtttactattactctct

SEQ ID NO: 1284 - DNA, 20 bp, Artificial sequence
  Synthetic oligonucleotide
agaagatagctggtagaagt

SEQ ID NO: 1285 - DNA, 20 bp, Artificial sequence
  Synthetic oligonucleotide
agcaatcactttatcagcta

SEQ ID NO: 1286 - DNA, 20 bp, Artificial sequence
  Synthetic oligonucleotide
agaggatatatactccacca

SEQ ID NO: 1287 - DNA, 20 bp, Artificial sequence
  Synthetic oligonucleotide
cagacctcatatcatttcca

SEQ ID NO: 1288 - DNA, 20 bp, Artificial sequence
  Synthetic oligonucleotide
cagcaattacacacatgctt

SEQ ID NO: 1289 - DNA, 20 bp, Artificial sequence
  Synthetic oligonucleotide
cttaccttgtgaaaatgcca

SEQ ID NO: 1290 - DNA, 20 bp, Artificial sequence
  Synthetic oligonucleotide
tacttatatccacattccac

SEQ ID NO: 1291 - DNA, 20 bp, Artificial sequence
  Synthetic oligonucleotide
ctgcaattcctctagttatt

SEQ ID NO: 1292 - DNA, 20 bp, Artificial sequence
  Synthetic oligonucleotide
attgtctgcagcacccatcc

SEQ ID NO: 1293 - DNA, 20 bp, Artificial sequence
  Synthetic oligonucleotide
tttccccgatcacctggtgt

SEQ ID NO: 1294 - DNA, 20 bp, Artificial sequence
  Synthetic oligonucleotide
ccagattcacccagttgcca

SEQ ID NO: 1295 - DNA, 20 bp, Artificial sequence
  Synthetic oligonucleotide
ttgcaataagatcacactac

SEQ ID NO: 1296 - DNA, 20 bp, Artificial sequence
  Synthetic oligonucleotide
gtcaacacatcttatttata

SEQ ID NO: 1297 - DNA, 20 bp, Artificial sequence
  Synthetic oligonucleotide
ccacttttctactacatatc

SEQ ID NO: 1298 - DNA, 20 bp, Artificial sequence
  Synthetic oligonucleotide
gtcacccaatccagcacttt

SEQ ID NO: 1299 - DNA, 20 bp, Artificial sequence
  Synthetic oligonucleotide
taggtatccattcttcagtt

SEQ ID NO: 1300 - DNA, 20 bp, Artificial sequence
  Synthetic oligonucleotide
gcagcagaattctttcaatt

SEQ ID NO: 1301 - DNA, 20 bp, Artificial sequence
  Synthetic oligonucleotide
aggtatacttgctgtcataa

SEQ ID NO: 1302 - DNA, 20 bp, Artificial sequence
  Synthetic oligonucleotide
agtcccagacagaacctact

SEQ ID NO: 1303 - DNA, 20 bp, Artificial sequence
  Synthetic oligonucleotide
ctgagttcctgtctcaggcc

SEQ ID NO: 1304 - DNA, 20 bp, Artificial sequence
  Synthetic oligonucleotide
tatcaagtacttcctcaact

SEQ ID NO: 1305 - DNA, 20 bp, Artificial sequence
  Synthetic oligonucleotide
aggactccatgattagtcac

SEQ ID NO: 1306 - DNA, 20 bp, Artificial sequence
  Synthetic oligonucleotide
taagcattatacttaagtgc

SEQ ID NO: 1307 - DNA, 20 bp, Artificial sequence
  Synthetic oligonucleotide
tgccaacttacctaacagat

SEQ ID NO: 1308 - DNA, 20 bp, Artificial sequence
  Synthetic oligonucleotide
tattctgccacttaaggctt

SEQ ID NO: 1309 - DNA, 20 bp, Artificial sequence
  Synthetic oligonucleotide
gttgaccactacttttcttc

SEQ ID NO: 1310 - DNA, 20 bp, Artificial sequence
  Synthetic oligonucleotide
aataggaatataccatggtc

SEQ ID NO: 1311 - DNA, 20 bp, Artificial sequence
  Synthetic oligonucleotide
ttctatactaacttcaggcc

SEQ ID NO: 1312 - DNA, 20 bp, Artificial sequence
  Synthetic oligonucleotide
cacaggcttctctaagttaa

SEQ ID NO: 1313 - DNA, 20 bp, Artificial sequence
  Synthetic oligonucleotide
cttgcatatatttctacagc

SEQ ID NO: 1314 - DNA, 20 bp, Artificial sequence
  Synthetic oligonucleotide
tggctttaatatctccatat

SEQ ID NO: 1315 - DNA, 20 bp, Artificial sequence
  Synthetic oligonucleotide
tgccagacattcccagatca

SEQ ID NO: 1316 - DNA, 20 bp, Artificial sequence
  Synthetic oligonucleotide
gttacactatttctaagatt

SEQ ID NO: 1317 - DNA, 20 bp, Artificial sequence
  Synthetic oligonucleotide
atacaccattcattcttaca

SEQ ID NO: 1318 - DNA, 20 bp, Artificial sequence
  Synthetic oligonucleotide
tcatccaattaactttggat

SEQ ID NO: 1319 - DNA, 20 bp, Artificial sequence
  Synthetic oligonucleotide
actgtatcttttgcataaaa

SEQ ID NO: 1320 - DNA, 20 bp, Artificial sequence
  Synthetic oligonucleotide
catcacaccatattcactct

SEQ ID NO: 1321 - DNA, 20 bp, Artificial sequence
  Synthetic oligonucleotide
cttccgtctcccaaatgaag

SEQ ID NO: 1322 - DNA, 20 bp, Artificial sequence
  Synthetic oligonucleotide
gtcttcacttattctctaac

SEQ ID NO: 1323 - DNA, 20 bp, Artificial sequence
  Synthetic oligonucleotide
tctatctgaccaaacacact

SEQ ID NO: 1324 - DNA, 20 bp, Artificial sequence
  Synthetic oligonucleotide
ccacaactattcaatctgta

SEQ ID NO: 1325 - DNA, 20 bp, Artificial sequence
  Synthetic oligonucleotide
agtacctttatttctacatc

SEQ ID NO: 1326 - DNA, 20 bp, Artificial sequence
  Synthetic oligonucleotide
atgcatttcaaattataccc

SEQ ID NO: 1327 - DNA, 20 bp, Artificial sequence
  Synthetic oligonucleotide
ttttcattgtaaactcactc

SEQ ID NO: 1328 - DNA, 20 bp, Artificial sequence
  Synthetic oligonucleotide
ggaatatttcatacctggat

SEQ ID NO: 1329 - DNA, 20 bp, Artificial sequence
  Synthetic oligonucleotide
gcagaaggattttttagtat

SEQ ID NO: 1330 - DNA, 20 bp, Artificial sequence
  Synthetic oligonucleotide
tcctaagaaactttatccac

SEQ ID NO: 1331 - DNA, 20 bp, Artificial sequence
  Synthetic oligonucleotide
ccatgttattcatatctata

SEQ ID NO: 1332 - DNA, 20 bp, Artificial sequence
  Synthetic oligonucleotide
ttcaatatcctttatcagcc

SEQ ID NO: 1333 - DNA, 20 bp, Artificial sequence
  Synthetic oligonucleotide
taccactatattttataggc

SEQ ID NO: 1334 - DNA, 20 bp, Artificial sequence
  Synthetic oligonucleotide
aactgcttaatcctatgaca

SEQ ID NO: 1335 - DNA, 20 bp, Artificial sequence
  Synthetic oligonucleotide
tgtaggagctctttccaccc

SEQ ID NO: 1336 - DNA, 20 bp, Artificial sequence
  Synthetic oligonucleotide
taattccccacctggtgtga

SEQ ID NO: 1337 - DNA, 20 bp, Artificial sequence
  Synthetic oligonucleotide
gttccattaaaatactatca

SEQ ID NO: 1338 - DNA, 20 bp, Artificial sequence
  Synthetic oligonucleotide
acgatatcctttcttactgc

SEQ ID NO: 1339 - DNA, 20 bp, Artificial sequence
  Synthetic oligonucleotide
ctcccagcaacacatcaatc

SEQ ID NO: 1340 - DNA, 20 bp, Artificial sequence
  Synthetic oligonucleotide
ctgaacttactcataacacc

SEQ ID NO: 1341 - DNA, 20 bp, Artificial sequence
  Synthetic oligonucleotide
gcaaaacattactttgtagc

SEQ ID NO: 1342 - DNA, 20 bp, Artificial sequence
  Synthetic oligonucleotide
agggtccaatcacatttcta

SEQ ID NO: 1343 - DNA, 20 bp, Artificial sequence
  Synthetic oligonucleotide
gctgaagtatcattaactcc

SEQ ID NO: 1344 - DNA, 20 bp, Artificial sequence
  Synthetic oligonucleotide
gcactccctaaaaacaaata

SEQ ID NO: 1345 - DNA, 20 bp, Artificial sequence
  Synthetic oligonucleotide
gctctacataaactaatgca

SEQ ID NO: 1346 - DNA, 20 bp, Artificial sequence
  Synthetic oligonucleotide
gggcaaaaccactttgagca

SEQ ID NO: 1347 - DNA, 20 bp, Artificial sequence
  Synthetic oligonucleotide
cagttacataccttttgatt

SEQ ID NO: 1348 - DNA, 20 bp, Artificial sequence
  Synthetic oligonucleotide
agcatcatcatattagccaa

SEQ ID NO: 1349 - DNA, 20 bp, Artificial sequence
  Synthetic oligonucleotide
acaatatgactgcttttaac

SEQ ID NO: 1350 - DNA, 20 bp, Artificial sequence
  Synthetic oligonucleotide
ggcaattccatcatgagtgc

SEQ ID NO: 1351 - DNA, 20 bp, Artificial sequence
  Synthetic oligonucleotide
caggaacatctgctagttta

SEQ ID NO: 1352 - DNA, 20 bp, Artificial sequence
  Synthetic oligonucleotide
accttccaacctttacccaa

SEQ ID NO: 1353 - DNA, 20 bp, Artificial sequence
  Synthetic oligonucleotide
gtagcatttttaactagcac

SEQ ID NO: 1354 - DNA, 20 bp, Artificial sequence
  Synthetic oligonucleotide
ctatctgaccaaacacacta

SEQ ID NO: 1355 - DNA, 20 bp, Artificial sequence
  Synthetic oligonucleotide
atggctctgctcactaggat

SEQ ID NO: 1356 - DNA, 20 bp, Artificial sequence
  Synthetic oligonucleotide
acaccatattcactctggtc

SEQ ID NO: 1357 - DNA, 20 bp, Artificial sequence
  Synthetic oligonucleotide
gcttcacaactcccaccttc

SEQ ID NO: 1358 - DNA, 20 bp, Artificial sequence
  Synthetic oligonucleotide
tgagttcctgtctcaggcct

SEQ ID NO: 1359 - DNA, 20 bp, Artificial sequence
  Synthetic oligonucleotide
tgcatttcaaattataccca

SEQ ID NO: 1360 - DNA, 20 bp, Artificial sequence
  Synthetic oligonucleotide
cgatttataatcaactagcc

SEQ ID NO: 1361 - DNA, 20 bp, Artificial sequence
  Synthetic oligonucleotide
cgtatttcttgcaaatgcat

SEQ ID NO: 1362 - DNA, 20 bp, Artificial sequence
  Synthetic oligonucleotide
ctgcacatataatcaagcaa

SEQ ID NO: 1363 - DNA, 20 bp, Artificial sequence
  Synthetic oligonucleotide
atcacagatttcatctgacc

SEQ ID NO: 1364 - DNA, 20 bp, Artificial sequence
  Synthetic oligonucleotide
cacacagctattcctgggta

SEQ ID NO: 1365 - DNA, 20 bp, Artificial sequence
  Synthetic oligonucleotide
actccatgattagtcacatc

SEQ ID NO: 1366 - DNA, 20 bp, Artificial sequence
  Synthetic oligonucleotide
ttacactatttctaagattt

SEQ ID NO: 1367 - DNA, 20 bp, Artificial sequence
  Synthetic oligonucleotide
tttctagttcacaaactggc

SEQ ID NO: 1368 - DNA, 20 bp, Artificial sequence
  Synthetic oligonucleotide
cgatatcctttcttactgct

SEQ ID NO: 1369 - DNA, 20 bp, Artificial sequence
  Synthetic oligonucleotide
ccaacttacctaacagatgt

SEQ ID NO: 1370 - DNA, 20 bp, Artificial sequence
  Synthetic oligonucleotide
gacatcatattttccttgtc

SEQ ID NO: 1371 - DNA, 20 bp, Artificial sequence
  Synthetic oligonucleotide
taggatctatcttttagttc

SEQ ID NO: 1372 - DNA, 20 bp, Artificial sequence
  Synthetic oligonucleotide
tgtcacataacctccacagt

SEQ ID NO: 1373 - DNA, 20 bp, Artificial sequence
  Synthetic oligonucleotide
tgaacttactcataacacca

SEQ ID NO: 1374 - DNA, 20 bp, Artificial sequence
  Synthetic oligonucleotide
cttatatccacattccacac

SEQ ID NO: 1375 - DNA, 20 bp, Artificial sequence
  Synthetic oligonucleotide
caatatgactgcttttaacc

SEQ ID NO: 1376 - DNA, 20 bp, Artificial sequence
  Synthetic oligonucleotide
gacttagttattcttatctc

SEQ ID NO: 1377 - DNA, 20 bp, Artificial sequence
  Synthetic oligonucleotide
agggtttaattttacagtat

SEQ ID NO: 1378 - DNA, 20 bp, Artificial sequence
  Synthetic oligonucleotide
atcagcttttatataaggtc

SEQ ID NO: 1379 - DNA, 20 bp, Artificial sequence
  Synthetic oligonucleotide
tgttttatacttccaagcac

SEQ ID NO: 1380 - DNA, 20 bp, Artificial sequence
  Synthetic oligonucleotide
agttacataccttttgatta

SEQ ID NO: 1381 - DNA, 20 bp, Artificial sequence
  Synthetic oligonucleotide
cttttgcataaaactctgta

SEQ ID NO: 1382 - DNA, 20 bp, Artificial sequence
  Synthetic oligonucleotide
attctgccacttaaggcttt

SEQ ID NO: 1383 - DNA, 20 bp, Artificial sequence
  Synthetic oligonucleotide
taggaatataccatggtcat

SEQ ID NO: 1384 - DNA, 20 bp, Artificial sequence
  Synthetic oligonucleotide
tttcattgtaaactcactct

SEQ ID NO: 1385 - DNA, 20 bp, Artificial sequence
  Synthetic oligonucleotide
gctgtcataaagttgtgatc

SEQ ID NO: 1386 - DNA, 20 bp, Artificial sequence
  Synthetic oligonucleotide
acaggcttctctaagttaac

SEQ ID NO: 1387 - DNA, 20 bp, Artificial sequence
  Synthetic oligonucleotide
cttcacttattctctaacta

SEQ ID NO: 1388 - DNA, 20 bp, Artificial sequence
  Synthetic oligonucleotide
actgcacatctacttagtac

SEQ ID NO: 1389 - DNA, 20 bp, Artificial sequence
  Synthetic oligonucleotide
tggctttacatatatgtcat

SEQ ID NO: 1390 - DNA, 20 bp, Artificial sequence
  Synthetic oligonucleotide
gttgcagcattttatatata

SEQ ID NO: 1391 - DNA, 20 bp, Artificial sequence
  Synthetic oligonucleotide
ttgaccactacttttcttct

SEQ ID NO: 1392 - DNA, 20 bp, Artificial sequence
  Synthetic oligonucleotide
gtcccagacagaacctacta

SEQ ID NO: 1393 - DNA, 20 bp, Artificial sequence
  Synthetic oligonucleotide
cctcaggtctccattcaagt

SEQ ID NO: 1394 - DNA, 20 bp, Artificial sequence
  Synthetic oligonucleotide
gtactaacaaccatttgttc

SEQ ID NO: 1395 - DNA, 20 bp, Artificial sequence
  Synthetic oligonucleotide
cgtctcccaaatgaagtttt

SEQ ID NO: 1396 - DNA, 20 bp, Artificial sequence
  Synthetic oligonucleotide
tgtctgcagcacccatccta

SEQ ID NO: 1397 - DNA, 20 bp, Artificial sequence
  Synthetic oligonucleotide
cgtaagttctttctcaacac

SEQ ID NO: 1398 - DNA, 20 bp, Artificial sequence
  Synthetic oligonucleotide
ggtctacaaatatctgccat

SEQ ID NO: 1399 - DNA, 20 bp, Artificial sequence
  Synthetic oligonucleotide
atcaaatcttattaccagga

SEQ ID NO: 1400 - DNA, 20 bp, Artificial sequence
  Synthetic oligonucleotide
ctgctagtttagccacattt

SEQ ID NO: 1401 - DNA, 20 bp, Artificial sequence
  Synthetic oligonucleotide
ccttccaacctttacccaat

SEQ ID NO: 1402 - DNA, 20 bp, Artificial sequence
  Synthetic oligonucleotide
tcccagcaacacatcaatca

SEQ ID NO: 1403 - DNA, 20 bp, Artificial sequence
  Synthetic oligonucleotide
gtaaccagaccaccagtact

SEQ ID NO: 1404 - DNA, 20 bp, Artificial sequence
  Synthetic oligonucleotide
tcacccaatccagcactttt

SEQ ID NO: 1405 - DNA, 20 bp, Artificial sequence
  Synthetic oligonucleotide
gttattcatatctatatgct

SEQ ID NO: 1406 - DNA, 20 bp, Artificial sequence
  Synthetic oligonucleotide
catcgacttattttttggca

SEQ ID NO: 1407 - DNA, 20 bp, Artificial sequence
  Synthetic oligonucleotide
tagcatttttaactagcacc

SEQ ID NO: 1408 - DNA, 20 bp, Artificial sequence
  Synthetic oligonucleotide
actgcttaatcctatgacaa

SEQ ID NO: 1409 - DNA, 20 bp, Artificial sequence
  Synthetic oligonucleotide
ttctcatagatacttttccc

SEQ ID NO: 1410 - DNA, 20 bp, Artificial sequence
  Synthetic oligonucleotide
ccttgtgaaaatgccatcca

SEQ ID NO: 1411 - DNA, 20 bp, Artificial sequence
  Synthetic oligonucleotide
gtaggagctctttccaccca

SEQ ID NO: 1412 - DNA, 20 bp, Artificial sequence
  Synthetic oligonucleotide
gccagacattcccagatcac

SEQ ID NO: 1413 - DNA, 20 bp, Artificial sequence
  Synthetic oligonucleotide
atagcaacttttcctggtct

SEQ ID NO: 1414 - DNA, 20 bp, Artificial sequence
  Synthetic oligonucleotide
tgtgactagcactatttaca

SEQ ID NO: 1415 - DNA, 20 bp, Artificial sequence
  Synthetic oligonucleotide
gcaattccatcatgagtgct

SEQ ID NO: 1416 - DNA, 20 bp, Artificial sequence
  Synthetic oligonucleotide
ttttccagagactttgaaac

SEQ ID NO: 1417 - DNA, 20 bp, Artificial sequence
  Synthetic oligonucleotide
ttctgttatatagagctcta

SEQ ID NO: 1418 - DNA, 20 bp, Artificial sequence
  Synthetic oligonucleotide
cagattcacccagttgccaa

SEQ ID NO: 1419 - DNA, 20 bp, Artificial sequence
  Synthetic oligonucleotide
ctagttttacccattgcagt

SEQ ID NO: 1420 - DNA, 20 bp, Artificial sequence
  Synthetic oligonucleotide
cttgctattaatcttaggtt

SEQ ID NO: 1421 - DNA, 20 bp, Artificial sequence
  Synthetic oligonucleotide
accactatattttataggca

SEQ ID NO: 1422 - DNA, 20 bp, Artificial sequence
  Synthetic oligonucleotide
ttagattactatcatctcta

SEQ ID NO: 1423 - DNA, 20 bp, Artificial sequence
  Synthetic oligonucleotide
gctggtagaagtatcagtca

SEQ ID NO: 1424 - DNA, 20 bp, Artificial sequence
  Synthetic oligonucleotide
ttctacatcatctatatcct

SEQ ID NO: 1425 - DNA, 20 bp, Artificial sequence
  Synthetic oligonucleotide
cctgtcatttattatggaca

SEQ ID NO: 1426 - DNA, 20 bp, Artificial sequence
  Synthetic oligonucleotide
gcagcttgttcattgagtat

SEQ ID NO: 1427 - DNA, 20 bp, Artificial sequence
  Synthetic oligonucleotide
gaatatttcatacctggatc

SEQ ID NO: 1428 - DNA, 20 bp, Artificial sequence
  Synthetic oligonucleotide
tcgaattctgtcatcctgca

SEQ ID NO: 1429 - DNA, 20 bp, Artificial sequence
  Synthetic oligonucleotide
tcttgtttaacccatatcct

SEQ ID NO: 1430 - DNA, 20 bp, Artificial sequence
  Synthetic oligonucleotide
cctaagaaactttatccacc

SEQ ID NO: 1431 - DNA, 20 bp, Artificial sequence
  Synthetic oligonucleotide
aatatttcatacctggatcc

SEQ ID NO: 1432 - DNA, 20 bp, Artificial sequence
  Synthetic oligonucleotide
actgctttttcaacactgta

SEQ ID NO: 1433 - DNA, 20 bp, Artificial sequence
  Synthetic oligonucleotide
ccaactttactcactctact

SEQ ID NO: 1434 - DNA, 20 bp, Artificial sequence
  Synthetic oligonucleotide
ttcacttattctctaactac

SEQ ID NO: 1435 - DNA, 20 bp, Artificial sequence
  Synthetic oligonucleotide
gtagtaaattactacttcat

SEQ ID NO: 1436 - DNA, 20 bp, Artificial sequence
  Synthetic oligonucleotide
ccactatattttataggcat

SEQ ID NO: 1437 - DNA, 20 bp, Artificial sequence
  Synthetic oligonucleotide
ccattccacatttacttggc

SEQ ID NO: 1438 - DNA, 20 bp, Artificial sequence
  Synthetic oligonucleotide
tcactaggatccatgaggat

SEQ ID NO: 1439 - DNA, 20 bp, Artificial sequence
  Synthetic oligonucleotide
cgtccctcttcctagttcat

SEQ ID NO: 1440 - DNA, 20 bp, Artificial sequence
  Synthetic oligonucleotide
cttctctaagttaacaatgc

SEQ ID NO: 1441 - DNA, 20 bp, Artificial sequence
  Synthetic oligonucleotide
aggatctatcttttagttca

SEQ ID NO: 1442 - DNA, 20 bp, Artificial sequence
  Synthetic oligonucleotide
cacttaaggctttactggac

SEQ ID NO: 1443 - DNA, 20 bp, Artificial sequence
  Synthetic oligonucleotide
ctacacttttgattatacct

SEQ ID NO: 1444 - DNA, 20 bp, Artificial sequence
  Synthetic oligonucleotide
tccagagactttgaaacatt

SEQ ID NO: 1445 - DNA, 20 bp, Artificial sequence
  Synthetic oligonucleotide
caggcctgccattaaaaacc

SEQ ID NO: 1446 - DNA, 20 bp, Artificial sequence
  Synthetic oligonucleotide
tgaaaatgccatccacaatc

SEQ ID NO: 1447 - DNA, 20 bp, Artificial sequence
  Synthetic oligonucleotide
tcccagacagaacctactat

SEQ ID NO: 1448 - DNA, 20 bp, Artificial sequence
  Synthetic oligonucleotide
tcttgcaaatgcattcggat

SEQ ID NO: 1449 - DNA, 20 bp, Artificial sequence
  Synthetic oligonucleotide
ccatggtcataattttatgc

SEQ ID NO: 1450 - DNA, 20 bp, Artificial sequence
  Synthetic oligonucleotide
gacagattttttccagcccc

SEQ ID NO: 1451 - DNA, 20 bp, Artificial sequence
  Synthetic oligonucleotide
gacattttctttctactccc

SEQ ID NO: 1452 - DNA, 20 bp, Artificial sequence
  Synthetic oligonucleotide
gttacataccttttgattaa

SEQ ID NO: 1453 - DNA, 20 bp, Artificial sequence
  Synthetic oligonucleotide
gcagtcattcactaatcaga

SEQ ID NO: 1454 - DNA, 20 bp, Artificial sequence
  Synthetic oligonucleotide
taggagctctttccacccat

SEQ ID NO: 1455 - DNA, 20 bp, Artificial sequence
  Synthetic oligonucleotide
acttacctaacagatgtggc

SEQ ID NO: 1456 - DNA, 20 bp, Artificial sequence
  Synthetic oligonucleotide
ttgctattaatcttaggttc

SEQ ID NO: 1457 - DNA, 20 bp, Artificial sequence
  Synthetic oligonucleotide
agttgtgatctaaatggcaa

SEQ ID NO: 1458 - DNA, 20 bp, Artificial sequence
  Synthetic oligonucleotide
taagttctttctcaacacta

SEQ ID NO: 1459 - DNA, 20 bp, Artificial sequence
  Synthetic oligonucleotide
ctcaggtctccattcaagtc

SEQ ID NO: 1460 - DNA, 20 bp, Artificial sequence
  Synthetic oligonucleotide
gtctcagaacattaatcttc

SEQ ID NO: 1461 - DNA, 20 bp, Artificial sequence
  Synthetic oligonucleotide
ctaagaaactttatccaccc

SEQ ID NO: 1462 - DNA, 20 bp, Artificial sequence
  Synthetic oligonucleotide
gcattgatttgaatttacct

SEQ ID NO: 1463 - DNA, 20 bp, Artificial sequence
  Synthetic oligonucleotide
cccagttgccaattatctga

SEQ ID NO: 1464 - DNA, 20 bp, Artificial sequence
  Synthetic oligonucleotide
tctgcagcacccatcctaca

SEQ ID NO: 1465 - DNA, 20 bp, Artificial sequence
  Synthetic oligonucleotide
attctaaatttctacaggct

SEQ ID NO: 1466 - DNA, 20 bp, Artificial sequence
  Synthetic oligonucleotide
ctagtttagccacatttaat

SEQ ID NO: 1467 - DNA, 20 bp, Artificial sequence
  Synthetic oligonucleotide
gaacaagcacaatttctgtc

SEQ ID NO: 1468 - DNA, 20 bp, Artificial sequence
  Synthetic oligonucleotide
gcacattctataaattctta

SEQ ID NO: 1469 - DNA, 20 bp, Artificial sequence
  Synthetic oligonucleotide
cgaattctgtcatcctgcac

SEQ ID NO: 1470 - DNA, 20 bp, Artificial sequence
  Synthetic oligonucleotide
ttcattgtaaactcactcta

SEQ ID NO: 1471 - DNA, 20 bp, Artificial sequence
  Synthetic oligonucleotide
gtcacataacctccacagta

SEQ ID NO: 1472 - DNA, 20 bp, Artificial sequence
  Synthetic oligonucleotide
cattccacacacaaaactgc

SEQ ID NO: 1473 - DNA, 20 bp, Artificial sequence
  Synthetic oligonucleotide
ccaatccttttgattaccaa

SEQ ID NO: 1474 - DNA, 20 bp, Artificial sequence
  Synthetic oligonucleotide
tcacagatttcatctgaccc

SEQ ID NO: 1475 - DNA, 20 bp, Artificial sequence
  Synthetic oligonucleotide
acccaatccagcactttttt

SEQ ID NO: 1476 - DNA, 20 bp, Artificial sequence
  Synthetic oligonucleotide
atcgacttattttttggcat

SEQ ID NO: 1477 - DNA, 20 bp, Artificial sequence
  Synthetic oligonucleotide
cttccaacctttacccaatc

SEQ ID NO: 1478 - DNA, 20 bp, Artificial sequence
  Synthetic oligonucleotide
cccagcaacacatcaatcac

SEQ ID NO: 1479 - DNA, 20 bp, Artificial sequence
  Synthetic oligonucleotide
tgttgcactttaatttgcca

SEQ ID NO: 1480 - DNA, 20 bp, Artificial sequence
  Synthetic oligonucleotide
aagcataccaaatacttcca

SEQ ID NO: 1481 - DNA, 20 bp, Artificial sequence
  Synthetic oligonucleotide
catttgctactctctccata

SEQ ID NO: 1482 - DNA, 20 bp, Artificial sequence
  Synthetic oligonucleotide
tatgactgcttttaaccgta

SEQ ID NO: 1483 - DNA, 20 bp, Artificial sequence
  Synthetic oligonucleotide
ccagaatttatctttgtgga

SEQ ID NO: 1484 - DNA, 20 bp, Artificial sequence
  Synthetic oligonucleotide
tctcatagatacttttccct

SEQ ID NO: 1485 - DNA, 20 bp, Artificial sequence
  Synthetic oligonucleotide
acacagctattcctgggtat

SEQ ID NO: 1486 - DNA, 20 bp, Artificial sequence
  Synthetic oligonucleotide
aggataactacactttcttc

SEQ ID NO: 1487 - DNA, 20 bp, Artificial sequence
  Synthetic oligonucleotide
gccttgattcattataagca

SEQ ID NO: 1488 - DNA, 20 bp, Artificial sequence
  Synthetic oligonucleotide
tcagcttttatataaggtca

SEQ ID NO: 1489 - DNA, 20 bp, Artificial sequence
  Synthetic oligonucleotide
gcttaatcctatgacaatat

SEQ ID NO: 1490 - DNA, 20 bp, Artificial sequence
  Synthetic oligonucleotide
gctgtttttacctttaggta

SEQ ID NO: 1491 - DNA, 20 bp, Artificial sequence
  Synthetic oligonucleotide
cttgagatcctctatcatta

SEQ ID NO: 1492 - DNA, 20 bp, Artificial sequence
  Synthetic oligonucleotide
ctgttatatagagctctatg

SEQ ID NO: 1493 - DNA, 20 bp, Artificial sequence
  Synthetic oligonucleotide
acatcatctatatcctttca

SEQ ID NO: 1494 - DNA, 20 bp, Artificial sequence
  Synthetic oligonucleotide
gtgtaagacataatttttca

SEQ ID NO: 1495 - DNA, 20 bp, Artificial sequence
  Synthetic oligonucleotide
ctggtagaagtatcagtcat

SEQ ID NO: 1496 - DNA, 20 bp, Artificial sequence
  Synthetic oligonucleotide
ctgaccaaacacactagatt

SEQ ID NO: 1497 - DNA, 20 bp, Artificial sequence
  Synthetic oligonucleotide
tcattgagtatctttaagta

SEQ ID NO: 1498 - DNA, 20 bp, Artificial sequence
  Synthetic oligonucleotide
gaagattttcactttggaac

SEQ ID NO: 1499 - DNA, 20 bp, Artificial sequence
  Synthetic oligonucleotide
ctagttcacaaactggcgga

SEQ ID NO: 1500 - DNA, 20 bp, Artificial sequence
  Synthetic oligonucleotide
ccagacattcccagatcact

SEQ ID NO: 1501 - DNA, 20 bp, Artificial sequence
  Synthetic oligonucleotide
cttcacaactcccaccttca

SEQ ID NO: 1502 - DNA, 20 bp, Artificial sequence
  Synthetic oligonucleotide
ctttggttttcatatcagtc

SEQ ID NO: 1503 - DNA, 20 bp, Artificial sequence
  Synthetic oligonucleotide
tccttgctattataataact

SEQ ID NO: 1504 - DNA, 20 bp, Artificial sequence
  Synthetic oligonucleotide
tagtgtggtctaaaacccac

SEQ ID NO: 1505 - DNA, 20 bp, Artificial sequence
  Synthetic oligonucleotide
catgattagtcacatctata

SEQ ID NO: 1506 - DNA, 20 bp, Artificial sequence
  Synthetic oligonucleotide
taatcctttactcaccttca

SEQ ID NO: 1507 - DNA, 20 bp, Artificial sequence
  Synthetic oligonucleotide
gagctctttccacccatgtt

SEQ ID NO: 1508 - DNA, 20 bp, Artificial sequence
  Synthetic oligonucleotide
gctgtattcaatgcctggaa

SEQ ID NO: 1509 - DNA, 20 bp, Artificial sequence
  Synthetic oligonucleotide
ccgcttattcaatctgcctt

SEQ ID NO: 1510 - DNA, 20 bp, Artificial sequence
  Synthetic oligonucleotide
gcataaggtacttactgata

SEQ ID NO: 1511 - DNA, 20 bp, Artificial sequence
  Synthetic oligonucleotide
cagacattcccagatcactt

SEQ ID NO: 1512 - DNA, 20 bp, Artificial sequence
  Synthetic oligonucleotide
tggtaagactttcccagact

SEQ ID NO: 1513 - DNA, 20 bp, Artificial sequence
  Synthetic oligonucleotide
tggtagaagtatcagtcatt

SEQ ID NO: 1514 - DNA, 20 bp, Artificial sequence
  Synthetic oligonucleotide
tgggcaactcatcctctaac

SEQ ID NO: 1515 - DNA, 20 bp, Artificial sequence
  Synthetic oligonucleotide
ttccaacctttacccaatca

SEQ ID NO: 1516 - DNA, 20 bp, Artificial sequence
  Synthetic oligonucleotide
ccagttgccaattatctgaa

SEQ ID NO: 1517 - DNA, 20 bp, Artificial sequence
  Synthetic oligonucleotide
gcatattctccctattgctt

SEQ ID NO: 1518 - DNA, 20 bp, Artificial sequence
  Synthetic oligonucleotide
agtgtggtctaaaacccaca

SEQ ID NO: 1519 - DNA, 20 bp, Artificial sequence
  Synthetic oligonucleotide
gcagcacccatcctacaagc

SEQ ID NO: 1520 - DNA, 20 bp, Artificial sequence
  Synthetic oligonucleotide
tccatatgccaattccatac

SEQ ID NO: 1521 - DNA, 20 bp, Artificial sequence
  Synthetic oligonucleotide
tttgattatacctttgcttc

SEQ ID NO: 1522 - DNA, 20 bp, Artificial sequence
  Synthetic oligonucleotide
ccagagactttgaaacattc

SEQ ID NO: 1523 - DNA, 20 bp, Artificial sequence
  Synthetic oligonucleotide
ctcatagatacttttccctc

SEQ ID NO: 1524 - DNA, 20 bp, Artificial sequence
  Synthetic oligonucleotide
cattccacatttacttggct

SEQ ID NO: 1525 - DNA, 20 bp, Artificial sequence
  Synthetic oligonucleotide
gcagcagacagataagagct

SEQ ID NO: 1526 - DNA, 20 bp, Artificial sequence
  Synthetic oligonucleotide
tcctatgacaatatttaacc

SEQ ID NO: 1527 - DNA, 20 bp, Artificial sequence
  Synthetic oligonucleotide
cattgagtatctttaagtaa

SEQ ID NO: 1528 - DNA, 20 bp, Artificial sequence
  Synthetic oligonucleotide
aatgccatccacaatcccaa

SEQ ID NO: 1529 - DNA, 20 bp, Artificial sequence
  Synthetic oligonucleotide
aagggctattattctctacc

SEQ ID NO: 1530 - DNA, 20 bp, Artificial sequence
  Synthetic oligonucleotide
ctgccattaaaaacctgcat

SEQ ID NO: 1531 - DNA, 20 bp, Artificial sequence
  Synthetic oligonucleotide
acagttctatatcaactcct

SEQ ID NO: 1532 - DNA, 20 bp, Artificial sequence
  Synthetic oligonucleotide
gtgttaactcatatcaggtc

SEQ ID NO: 1533 - DNA, 20 bp, Artificial sequence
  Synthetic oligonucleotide
atggcaataaatattgagct

SEQ ID NO: 1534 - DNA, 20 bp, Artificial sequence
  Synthetic oligonucleotide
gaaccatgattctcttggta

SEQ ID NO: 1535 - DNA, 20 bp, Artificial sequence
  Synthetic oligonucleotide
tcagcaactttatttttggc

SEQ ID NO: 1536 - DNA, 20 bp, Artificial sequence
  Synthetic oligonucleotide
taagaaactttatccaccca

SEQ ID NO: 1537 - DNA, 20 bp, Artificial sequence
  Synthetic oligonucleotide
ttcacaactcccaccttcaa

SEQ ID NO: 1538 - DNA, 20 bp, Artificial sequence
  Synthetic oligonucleotide
agcaatctctcatattcttc

SEQ ID NO: 1539 - DNA, 20 bp, Artificial sequence
  Synthetic oligonucleotide
atgattagtcacatctatac

SEQ ID NO: 1540 - DNA, 20 bp, Artificial sequence
  Synthetic oligonucleotide
ccagacttgatttctgctct

SEQ ID NO: 1541 - DNA, 20 bp, Artificial sequence
  Synthetic oligonucleotide
tctctaagttaacaatgcca

SEQ ID NO: 1542 - DNA, 20 bp, Artificial sequence
  Synthetic oligonucleotide
tctaccaattatctcagggt

SEQ ID NO: 1543 - DNA, 20 bp, Artificial sequence
  Synthetic oligonucleotide
cattgtaaactcactctaga

SEQ ID NO: 1544 - DNA, 20 bp, Artificial sequence
  Synthetic oligonucleotide
tttgcatactaactaccacc

SEQ ID NO: 1545 - DNA, 20 bp, Artificial sequence
  Synthetic oligonucleotide
tcaggtctccattcaagtca

SEQ ID NO: 1546 - DNA, 20 bp, Artificial sequence
  Synthetic oligonucleotide
atgccaacttgaacctgctc

SEQ ID NO: 1547 - DNA, 20 bp, Artificial sequence
  Synthetic oligonucleotide
ctgagttacatctttttgca

SEQ ID NO: 1548 - DNA, 20 bp, Artificial sequence
  Synthetic oligonucleotide
gttatatagagctctatgtg

SEQ ID NO: 1549 - DNA, 20 bp, Artificial sequence
  Synthetic oligonucleotide
acactttgcatacatacctt

SEQ ID NO: 1550 - DNA, 20 bp, Artificial sequence
  Synthetic oligonucleotide
attccacacacaaaactgca

SEQ ID NO: 1551 - DNA, 20 bp, Artificial sequence
  Synthetic oligonucleotide
cagccacatcttttcttgta

SEQ ID NO: 1552 - DNA, 20 bp, Artificial sequence
  Synthetic oligonucleotide
cccttgtatttgcctgacct

SEQ ID NO: 1553 - DNA, 20 bp, Artificial sequence
  Synthetic oligonucleotide
cgtttcgaatcttcagaaga

SEQ ID NO: 1554 - DNA, 20 bp, Artificial sequence
  Synthetic oligonucleotide
aggtacttttttcacttatc

SEQ ID NO: 1555 - DNA, 20 bp, Artificial sequence
  Synthetic oligonucleotide
taccaaatacttccatgcat

SEQ ID NO: 1556 - DNA, 20 bp, Artificial sequence
  Synthetic oligonucleotide
atgaaaaatatcttacctgc

SEQ ID NO: 1557 - DNA, 20 bp, Artificial sequence
  Synthetic oligonucleotide
gcagcagtcaattcacttcc

SEQ ID NO: 1558 - DNA, 20 bp, Artificial sequence
  Synthetic oligonucleotide
gatcctctatcattatcacc

SEQ ID NO: 1559 - DNA, 20 bp, Artificial sequence
  Synthetic oligonucleotide
catggtcataattttatgct

SEQ ID NO: 1560 - DNA, 20 bp, Artificial sequence
  Synthetic oligonucleotide
tagtttagccacatttaatc

SEQ ID NO: 1561 - DNA, 20 bp, Artificial sequence
  Synthetic oligonucleotide
ctgatgttctaactcatctc

SEQ ID NO: 1562 - DNA, 20 bp, Artificial sequence
  Synthetic oligonucleotide
aagcatttcacacctaaccc

SEQ ID NO: 1563 - DNA, 20 bp, Artificial sequence
  Synthetic oligonucleotide
ttgcaaatgcattcggatct

SEQ ID NO: 1564 - DNA, 20 bp, Artificial sequence
  Synthetic oligonucleotide
ccagcaacacatcaatcaca

SEQ ID NO: 1565 - DNA, 20 bp, Artificial sequence
  Synthetic oligonucleotide
taatgttactttcactgcat

SEQ ID NO: 1566 - DNA, 20 bp, Artificial sequence
  Synthetic oligonucleotide
acccaatatattcttctagc

SEQ ID NO: 1567 - DNA, 20 bp, Artificial sequence
  Synthetic oligonucleotide
ccagaatctttaattgtcct

SEQ ID NO: 1568 - DNA, 20 bp, Artificial sequence
  Synthetic oligonucleotide
cccaatccagcactttttta

SEQ ID NO: 1569 - DNA, 20 bp, Artificial sequence
  Synthetic oligonucleotide
tccagtttgctttcatcctc

SEQ ID NO: 1570 - DNA, 20 bp, Artificial sequence
  Synthetic oligonucleotide
gaattctgtcatcctgcaca

SEQ ID NO: 1571 - DNA, 20 bp, Artificial sequence
  Synthetic oligonucleotide
tcatctatatcctttcaatc

SEQ ID NO: 1572 - DNA, 20 bp, Artificial sequence
  Synthetic oligonucleotide
cttcctagttcatccaagat

SEQ ID NO: 1573 - DNA, 20 bp, Artificial sequence
  Synthetic oligonucleotide
caaacagggttaaggatttc

SEQ ID NO: 1574 - DNA, 20 bp, Artificial sequence
  Synthetic oligonucleotide
gcctgaaaagacgacttacc

SEQ ID NO: 1575 - DNA, 20 bp, Artificial sequence
  Synthetic oligonucleotide
tgaccaaacacactagattc

SEQ ID NO: 1576 - DNA, 20 bp, Artificial sequence
  Synthetic oligonucleotide
aagcagcagctctactggct

SEQ ID NO: 1577 - DNA, 20 bp, Artificial sequence
  Synthetic oligonucleotide
cagaacattaatcttctcca

SEQ ID NO: 1578 - DNA, 20 bp, Artificial sequence
  Synthetic oligonucleotide
gcataaaactctgtaactgc

SEQ ID NO: 1579 - DNA, 20 bp, Artificial sequence
  Synthetic oligonucleotide
ggataactacactttcttca

SEQ ID NO: 1580 - DNA, 20 bp, Artificial sequence
  Synthetic oligonucleotide
taggcatttaactctgtctt

SEQ ID NO: 1581 - DNA, 20 bp, Artificial sequence
  Synthetic oligonucleotide
acttaaggctttactggact

SEQ ID NO: 1582 - DNA, 20 bp, Artificial sequence
  Synthetic oligonucleotide
tgactgcttttaaccgtagt

SEQ ID NO: 1583 - DNA, 20 bp, Artificial sequence
  Synthetic oligonucleotide
ccagacagaacctactatgt

SEQ ID NO: 1584 - DNA, 20 bp, Artificial sequence
  Synthetic oligonucleotide
tgattagtcacatctatacc

SEQ ID NO: 1585 - DNA, 20 bp, Artificial sequence
  Synthetic oligonucleotide
gcagtagaatctatccacaa

SEQ ID NO: 1586 - DNA, 20 bp, Artificial sequence
  Synthetic oligonucleotide
ctgaaaagacgacttacctc

SEQ ID NO: 1587 - DNA, 20 bp, Artificial sequence
  Synthetic oligonucleotide
cataaggtacttactgataa

SEQ ID NO: 1588 - DNA, 20 bp, Artificial sequence
  Synthetic oligonucleotide
acaacttaattttctaggac

SEQ ID NO: 1589 - DNA, 20 bp, Artificial sequence
  Synthetic oligonucleotide
atggtcataattttatgctc

SEQ ID NO: 1590 - DNA, 20 bp, Artificial sequence
  Synthetic oligonucleotide
accgtagtgatttcaaatat

SEQ ID NO: 1591 - DNA, 20 bp, Artificial sequence
  Synthetic oligonucleotide
cctctatcattatcaccata

SEQ ID NO: 1592 - DNA, 20 bp, Artificial sequence
  Synthetic oligonucleotide
ccaacctttacccaatcagt

SEQ ID NO: 1593 - DNA, 20 bp, Artificial sequence
  Synthetic oligonucleotide
agacattcccagatcacttc

SEQ ID NO: 1594 - DNA, 20 bp, Artificial sequence
  Synthetic oligonucleotide
tggcaataaatattgagctc

SEQ ID NO: 1595 - DNA, 20 bp, Artificial sequence
  Synthetic oligonucleotide
ccacattttcaacattagta

SEQ ID NO: 1596 - DNA, 20 bp, Artificial sequence
  Synthetic oligonucleotide
attccacatttacttggctc

SEQ ID NO: 1597 - DNA, 20 bp, Artificial sequence
  Synthetic oligonucleotide
gcacaatatctttacctgct

SEQ ID NO: 1598 - DNA, 20 bp, Artificial sequence
  Synthetic oligonucleotide
accaaatacttccatgcatt

SEQ ID NO: 1599 - DNA, 20 bp, Artificial sequence
  Synthetic oligonucleotide
ccagtttgctttcatcctca

SEQ ID NO: 1600 - DNA, 20 bp, Artificial sequence
  Synthetic oligonucleotide
ctccactttaaattatggta

SEQ ID NO: 1601 - DNA, 20 bp, Artificial sequence
  Synthetic oligonucleotide
tctgtatcacgaccacagtc

SEQ ID NO: 1602 - DNA, 20 bp, Artificial sequence
  Synthetic oligonucleotide
atgccatccacaatcccaat

SEQ ID NO: 1603 - DNA, 20 bp, Artificial sequence
  Synthetic oligonucleotide
gcatttcacacctaacccct

SEQ ID NO: 1604 - DNA, 20 bp, Artificial sequence
  Synthetic oligonucleotide
attgtaaactcactctagaa

SEQ ID NO: 1605 - DNA, 20 bp, Artificial sequence
  Synthetic oligonucleotide
tgagttacatctttttgcaa

SEQ ID NO: 1606 - DNA, 20 bp, Artificial sequence
  Synthetic oligonucleotide
acccacaatatctatcaccc

SEQ ID NO: 1607 - DNA, 20 bp, Artificial sequence
  Synthetic oligonucleotide
tcatattcttctcctgggac

SEQ ID NO: 1608 - DNA, 20 bp, Artificial sequence
  Synthetic oligonucleotide
tctatatcctttcaatctcc

SEQ ID NO: 1609 - DNA, 20 bp, Artificial sequence
  Synthetic oligonucleotide
gtgcacatattctcagttaa

SEQ ID NO: 1610 - DNA, 20 bp, Artificial sequence
  Synthetic oligonucleotide
acacaaaactgcatctttgt

SEQ ID NO: 1611 - DNA, 20 bp, Artificial sequence
  Synthetic oligonucleotide
cagttgccaattatctgaac

SEQ ID NO: 1612 - DNA, 20 bp, Artificial sequence
  Synthetic oligonucleotide
cccaatatattcttctagct

SEQ ID NO: 1613 - DNA, 20 bp, Artificial sequence
  Synthetic oligonucleotide
cactacatattctttacaac

SEQ ID NO: 1614 - DNA, 20 bp, Artificial sequence
  Synthetic oligonucleotide
agttctatatcaactcctac

SEQ ID NO: 1615 - DNA, 20 bp, Artificial sequence
  Synthetic oligonucleotide
agcagtcaattcacttccat

SEQ ID NO: 1616 - DNA, 20 bp, Artificial sequence
  Synthetic oligonucleotide
cagcacccatcctacaagca

SEQ ID NO: 1617 - DNA, 20 bp, Artificial sequence
  Synthetic oligonucleotide
cttaaggctttactggactt

SEQ ID NO: 1618 - DNA, 20 bp, Artificial sequence
  Synthetic oligonucleotide
gcagcagctctactggctgc

SEQ ID NO: 1619 - DNA, 20 bp, Artificial sequence
  Synthetic oligonucleotide
actcaatgttaactatagct

SEQ ID NO: 1620 - DNA, 20 bp, Artificial sequence
  Synthetic oligonucleotide
aagggttatatctaccagca

SEQ ID NO: 1621 - DNA, 20 bp, Artificial sequence
  Synthetic oligonucleotide
cgtcaataacaccttgaatt

SEQ ID NO: 1622 - DNA, 20 bp, Artificial sequence
  Synthetic oligonucleotide
ccatactaacttaccattgc

SEQ ID NO: 1623 - DNA, 20 bp, Artificial sequence
  Synthetic oligonucleotide
tcttgcttatttattaccaa

SEQ ID NO: 1624 - DNA, 20 bp, Artificial sequence
  Synthetic oligonucleotide
attgagtatctttaagtaat

SEQ ID NO: 1625 - DNA, 20 bp, Artificial sequence
  Synthetic oligonucleotide
caggaagatcttttctccac

SEQ ID NO: 1626 - DNA, 20 bp, Artificial sequence
  Synthetic oligonucleotide
caggtctccattcaagtcat

SEQ ID NO: 1627 - DNA, 20 bp, Artificial sequence
  Synthetic oligonucleotide
ttgcatactaactaccacca

SEQ ID NO: 1628 - DNA, 20 bp, Artificial sequence
  Synthetic oligonucleotide
tgttaactcatatcaggtct

SEQ ID NO: 1629 - DNA, 20 bp, Artificial sequence
  Synthetic oligonucleotide
ttcctagttcatccaagata

SEQ ID NO: 1630 - DNA, 20 bp, Artificial sequence
  Synthetic oligonucleotide
tttggcttaatatactgttc

SEQ ID NO: 1631 - DNA, 20 bp, Artificial sequence
  Synthetic oligonucleotide
aacagggttaaggatttcac

SEQ ID NO: 1632 - DNA, 20 bp, Artificial sequence
  Synthetic oligonucleotide
tgctattcaacataatagtc

SEQ ID NO: 1633 - DNA, 20 bp, Artificial sequence
  Synthetic oligonucleotide
agtttagccacatttaatcc

SEQ ID NO: 1634 - DNA, 20 bp, Artificial sequence
  Synthetic oligonucleotide
ctctaagttaacaatgccag

SEQ ID NO: 1635 - DNA, 20 bp, Artificial sequence
  Synthetic oligonucleotide
aaaaatatcttacctgcagt

SEQ ID NO: 1636 - DNA, 20 bp, Artificial sequence
  Synthetic oligonucleotide
tcatagatacttttccctca

SEQ ID NO: 1637 - DNA, 20 bp, Artificial sequence
  Synthetic oligonucleotide
tcttaattctgacttcagcc

SEQ ID NO: 1638 - DNA, 20 bp, Artificial sequence
  Synthetic oligonucleotide
gtagaagtatcagtcattat

SEQ ID NO: 1639 - DNA, 20 bp, Artificial sequence
  Synthetic oligonucleotide
tgtggtctaaaacccacagc

SEQ ID NO: 1640 - DNA, 20 bp, Artificial sequence
  Synthetic oligonucleotide
ttgcatacataccttcacct

SEQ ID NO: 1641 - DNA, 20 bp, Artificial sequence
  Synthetic oligonucleotide
gttctaactcatctctgtca

SEQ ID NO: 1642 - DNA, 20 bp, Artificial sequence
  Synthetic oligonucleotide
ccaatccagcacttttttaa

SEQ ID NO: 1643 - DNA, 20 bp, Artificial sequence
  Synthetic oligonucleotide
tgccattaaaaacctgcata

SEQ ID NO: 1644 - DNA, 20 bp, Artificial sequence
  Synthetic oligonucleotide
agctctttccacccatgttt

SEQ ID NO: 1645 - DNA, 20 bp, Artificial sequence
  Synthetic oligonucleotide
cagagactttgaaacattcc

SEQ ID NO: 1646 - DNA, 20 bp, Artificial sequence
  Synthetic oligonucleotide
gaccaaacacactagattct

SEQ ID NO: 1647 - DNA, 20 bp, Artificial sequence
  Synthetic oligonucleotide
cagaacctactatgtgcggc

SEQ ID NO: 1648 - DNA, 20 bp, Artificial sequence
  Synthetic oligonucleotide
cagcaacacatcaatcacag

SEQ ID NO: 1649 - DNA, 20 bp, Artificial sequence
  Synthetic oligonucleotide
agaacattaatcttctccac

SEQ ID NO: 1650 - DNA, 20 bp, Artificial sequence
  Synthetic oligonucleotide
gtatttgcctgacctgattc

SEQ ID NO: 1651 - DNA, 20 bp, Artificial sequence
  Synthetic oligonucleotide
cataaaactctgtaactgcc

SEQ ID NO: 1652 - DNA, 20 bp, Artificial sequence
  Synthetic oligonucleotide
ctatgacaatatttaacctt

SEQ ID NO: 1653 - DNA, 20 bp, Artificial sequence
  Synthetic oligonucleotide
ctgtattcaatgcctggaac

SEQ ID NO: 1654 - DNA, 20 bp, Artificial sequence
  Synthetic oligonucleotide
tcacaactcccaccttcaac

SEQ ID NO: 1655 - DNA, 20 bp, Artificial sequence
  Synthetic oligonucleotide
ctggtgactactcatttgta

SEQ ID NO: 1656 - DNA, 20 bp, Artificial sequence
  Synthetic oligonucleotide
cattcaacaatcttttggca

SEQ ID NO: 1657 - DNA, 20 bp, Artificial sequence
  Synthetic oligonucleotide
ctgtcatcctgcacactgaa

SEQ ID NO: 1658 - DNA, 20 bp, Artificial sequence
  Synthetic oligonucleotide
gcatatctttcaatgactta

SEQ ID NO: 1659 - DNA, 20 bp, Artificial sequence
  Synthetic oligonucleotide
ttcgaatcttcagaagaaac

SEQ ID NO: 1660 - DNA, 20 bp, Artificial sequence
  Synthetic oligonucleotide
aagaaactttatccacccaa

SEQ ID NO: 1661 - DNA, 20 bp, Artificial sequence
  Synthetic oligonucleotide
gctttactggacttactgtc

SEQ ID NO: 1662 - DNA, 20 bp, Artificial sequence
  Synthetic oligonucleotide
atggttatttacaacctcac

SEQ ID NO: 1663 - DNA, 20 bp, Artificial sequence
  Synthetic oligonucleotide
gtactcctactattcttacc

SEQ ID NO: 1664 - DNA, 20 bp, Artificial sequence
  Synthetic oligonucleotide
accatgacttcctttatgct

SEQ ID NO: 1665 - DNA, 20 bp, Artificial sequence
  Synthetic oligonucleotide
tgcctagtataaaacaggta

SEQ ID NO: 1666 - DNA, 20 bp, Artificial sequence
  Synthetic oligonucleotide
ctgaatggagaacttccgat

SEQ ID NO: 1667 - DNA, 20 bp, Artificial sequence
  Synthetic oligonucleotide
tggatttcaggcttcccgta

SEQ ID NO: 1668 - DNA, 20 bp, Artificial sequence
  Synthetic oligonucleotide
ttgcctgacctgattctgta

SEQ ID NO: 1669 - DNA, 20 bp, Artificial sequence
  Synthetic oligonucleotide
gtgctgctgcttcatttcta

SEQ ID NO: 1670 - DNA, 20 bp, Artificial sequence
  Synthetic oligonucleotide
cagtttgctttcatcctcac

SEQ ID NO: 1671 - DNA, 20 bp, Artificial sequence
  Synthetic oligonucleotide
gaacattaatcttctccacc

SEQ ID NO: 1672 - DNA, 20 bp, Artificial sequence
  Synthetic oligonucleotide
gcaaacattttcctacagca

SEQ ID NO: 1673 - DNA, 20 bp, Artificial sequence
  Synthetic oligonucleotide
ctgcacacattataacctca

SEQ ID NO: 1674 - DNA, 20 bp, Artificial sequence
  Synthetic oligonucleotide
tctaagttaacaatgccaga

SEQ ID NO: 1675 - DNA, 20 bp, Artificial sequence
  Synthetic oligonucleotide
gttctcatatcttcaaggta

SEQ ID NO: 1676 - DNA, 20 bp, Artificial sequence
  Synthetic oligonucleotide
atgaaactgtattactgcac

SEQ ID NO: 1677 - DNA, 20 bp, Artificial sequence
  Synthetic oligonucleotide
cccacaatatctatcaccct

SEQ ID NO: 1678 - DNA, 20 bp, Artificial sequence
  Synthetic oligonucleotide
acagacagttatcttggcac

SEQ ID NO: 1679 - DNA, 20 bp, Artificial sequence
  Synthetic oligonucleotide
gctaacttttgaatttcctc

SEQ ID NO: 1680 - DNA, 20 bp, Artificial sequence
  Synthetic oligonucleotide
taggcattactatttcaata

SEQ ID NO: 1681 - DNA, 20 bp, Artificial sequence
  Synthetic oligonucleotide
acaactcccaccttcaacaa

SEQ ID NO: 1682 - DNA, 20 bp, Artificial sequence
  Synthetic oligonucleotide
ttgtaaactcactctagaaa

SEQ ID NO: 1683 - DNA, 20 bp, Artificial sequence
  Synthetic oligonucleotide
agcaacacatcaatcacagg

SEQ ID NO: 1684 - DNA, 20 bp, Artificial sequence
  Synthetic oligonucleotide
gcaggcttgacatccgggtt

SEQ ID NO: 1685 - DNA, 20 bp, Artificial sequence
  Synthetic oligonucleotide
aatatcttacctgcagtaat

SEQ ID NO: 1686 - DNA, 20 bp, Artificial sequence
  Synthetic oligonucleotide
ctaccagcatcctaaggtat

SEQ ID NO: 1687 - DNA, 20 bp, Artificial sequence
  Synthetic oligonucleotide
gtcaataacaccttgaattt

SEQ ID NO: 1688 - DNA, 20 bp, Artificial sequence
  Synthetic oligonucleotide
agagactttgaaacattcct

SEQ ID NO: 1689 - DNA, 20 bp, Artificial sequence
  Synthetic oligonucleotide
ctgtactgatcaattatagt

SEQ ID NO: 1690 - DNA, 20 bp, Artificial sequence
  Synthetic oligonucleotide
ttgcttatttattaccaatc

SEQ ID NO: 1691 - DNA, 20 bp, Artificial sequence
  Synthetic oligonucleotide
gccgaaactcttactcactc

SEQ ID NO: 1692 - DNA, 20 bp, Artificial sequence
  Synthetic oligonucleotide
agttgccaattatctgaact

SEQ ID NO: 1693 - DNA, 20 bp, Artificial sequence
  Synthetic oligonucleotide
agcacccatcctacaagcaa

SEQ ID NO: 1694 - DNA, 20 bp, Artificial sequence
  Synthetic oligonucleotide
gtagtttttcactctagact

SEQ ID NO: 1695 - DNA, 20 bp, Artificial sequence
  Synthetic oligonucleotide
ttggtcatatattaatagct

SEQ ID NO: 1696 - DNA, 20 bp, Artificial sequence
  Synthetic oligonucleotide
tgtcttacttattattggcc

SEQ ID NO: 1697 - DNA, 20 bp, Artificial sequence
  Synthetic oligonucleotide
tactatcacatctttcagca

SEQ ID NO: 1698 - DNA, 20 bp, Artificial sequence
  Synthetic oligonucleotide
agtatctttaagtaatgctc

SEQ ID NO: 1699 - DNA, 20 bp, Artificial sequence
  Synthetic oligonucleotide
tgaaaagacgacttacctct

SEQ ID NO: 1700 - DNA, 20 bp, Artificial sequence
  Synthetic oligonucleotide
agtctcttaatttctagggc

SEQ ID NO: 1701 - DNA, 20 bp, Artificial sequence
  Synthetic oligonucleotide
tgcatactaactaccaccac

SEQ ID NO: 1702 - DNA, 20 bp, Artificial sequence
  Synthetic oligonucleotide
gtgaactatttaactgaaca

SEQ ID NO: 1703 - DNA, 20 bp, Artificial sequence
  Synthetic oligonucleotide
ttgctaacttgatcccacca

SEQ ID NO: 1704 - DNA, 20 bp, Artificial sequence
  Synthetic oligonucleotide
aaatttcatgaccttattcc

SEQ ID NO: 1705 - DNA, 20 bp, Artificial sequence
  Synthetic oligonucleotide
ccgaccacttaataacattt

SEQ ID NO: 1706 - DNA, 20 bp, Artificial sequence
  Synthetic oligonucleotide
ttggtacatattccagggca

SEQ ID NO: 1707 - DNA, 20 bp, Artificial sequence
  Synthetic oligonucleotide
gaaactttatccacccaaac

SEQ ID NO: 1708 - DNA, 20 bp, Artificial sequence
  Synthetic oligonucleotide
gtttagccacatttaatcca

SEQ ID NO: 1709 - DNA, 20 bp, Artificial sequence
  Synthetic oligonucleotide
tggtcataattttatgctca

SEQ ID NO: 1710 - DNA, 20 bp, Artificial sequence
  Synthetic oligonucleotide
cagggttaaggatttcacct

SEQ ID NO: 1711 - DNA, 20 bp, Artificial sequence
  Synthetic oligonucleotide
gccattaaaaacctgcataa

SEQ ID NO: 1712 - DNA, 20 bp, Artificial sequence
  Synthetic oligonucleotide
ccacaaattttgcctccaac

SEQ ID NO: 1713 - DNA, 20 bp, Artificial sequence
  Synthetic oligonucleotide
tgccatccacaatcccaatt

SEQ ID NO: 1714 - DNA, 20 bp, Artificial sequence
  Synthetic oligonucleotide
aatcagtaaaactcttcgac

SEQ ID NO: 1715 - DNA, 20 bp, Artificial sequence
  Synthetic oligonucleotide
gcaataaatattgagctctc

SEQ ID NO: 1716 - DNA, 20 bp, Artificial sequence
  Synthetic oligonucleotide
gcagtcaattcacttccatt

SEQ ID NO: 1717 - DNA, 20 bp, Artificial sequence
  Synthetic oligonucleotide
gacattcccagatcacttcc

SEQ ID NO: 1718 - DNA, 20 bp, Artificial sequence
  Synthetic oligonucleotide
gttctatatcaactcctact

SEQ ID NO: 1719 - DNA, 20 bp, Artificial sequence
  Synthetic oligonucleotide
aggtctccattcaagtcatc

SEQ ID NO: 1720 - DNA, 20 bp, Artificial sequence
  Synthetic oligonucleotide
caacctttacccaatcagtt

SEQ ID NO: 1721 - DNA, 20 bp, Artificial sequence
  Synthetic oligonucleotide
tcctagttcatccaagataa

SEQ ID NO: 1722 - DNA, 20 bp, Artificial sequence
  Synthetic oligonucleotide
ccagacttaatccctttact

SEQ ID NO: 1723 - DNA, 20 bp, Artificial sequence
  Synthetic oligonucleotide
aaggtacttactgataaatc

SEQ ID NO: 1724 - DNA, 20 bp, Artificial sequence
  Synthetic oligonucleotide
tttgtttcacttcataccct

SEQ ID NO: 1725 - DNA, 20 bp, Artificial sequence
  Synthetic oligonucleotide
gattagtcacatctatacca

SEQ ID NO: 1726 - DNA, 20 bp, Artificial sequence
  Synthetic oligonucleotide
aggccaacatatttatcaaa

SEQ ID NO: 1727 - DNA, 20 bp, Artificial sequence
  Synthetic oligonucleotide
caggacatatactccatgcc

SEQ ID NO: 1728 - DNA, 20 bp, Artificial sequence
  Synthetic oligonucleotide
tcatcctgcacactgaaaga

SEQ ID NO: 1729 - DNA, 20 bp, Artificial sequence
  Synthetic oligonucleotide
agactgatatcatcaaaatc

SEQ ID NO: 1730 - DNA, 20 bp, Artificial sequence
  Synthetic oligonucleotide
gtccaaaaaggatatcttct

SEQ ID NO: 1731 - DNA, 20 bp, Artificial sequence
  Synthetic oligonucleotide
gaagtatcagtcattatctc

SEQ ID NO: 1732 - DNA, 20 bp, Artificial sequence
  Synthetic oligonucleotide
cagtgcaattttacagactc

SEQ ID NO: 1733 - DNA, 20 bp, Artificial sequence
  Synthetic oligonucleotide
tggtctaaaacccacagcaa

SEQ ID NO: 1734 - DNA, 20 bp, Artificial sequence
  Synthetic oligonucleotide
ataaaactctgtaactgcct

SEQ ID NO: 1735 - DNA, 20 bp, Artificial sequence
  Synthetic oligonucleotide
gttcttaccaaacttttcct

SEQ ID NO: 1736 - DNA, 20 bp, Artificial sequence
  Synthetic oligonucleotide
tctttccacccatgtttggt

SEQ ID NO: 1737 - DNA, 20 bp, Artificial sequence
  Synthetic oligonucleotide
ccgtagtgatttcaaatatt

SEQ ID NO: 1738 - DNA, 20 bp, Artificial sequence
  Synthetic oligonucleotide
aggacatatactccatgcca

SEQ ID NO: 1739 - DNA, 20 bp, Artificial sequence
  Synthetic oligonucleotide
tctccattcaagtcatcatc

SEQ ID NO: 1740 - DNA, 20 bp, Artificial sequence
  Synthetic oligonucleotide
agtatcagtcattatctcat

SEQ ID NO: 1741 - DNA, 20 bp, Artificial sequence
  Synthetic oligonucleotide
ttacatctttacctttgatc

SEQ ID NO: 1742 - DNA, 20 bp, Artificial sequence
  Synthetic oligonucleotide
ccaacagcacctttttcact

SEQ ID NO: 1743 - DNA, 20 bp, Artificial sequence
  Synthetic oligonucleotide
tcatggctccattttaagcc

SEQ ID NO: 1744 - DNA, 20 bp, Artificial sequence
  Synthetic oligonucleotide
attagtcacatctataccat

SEQ ID NO: 1745 - DNA, 20 bp, Artificial sequence
  Synthetic oligonucleotide
ttagccacatttaatccata

SEQ ID NO: 1746 - DNA, 20 bp, Artificial sequence
  Synthetic oligonucleotide
tccaaaaaggatatcttctc

SEQ ID NO: 1747 - DNA, 20 bp, Artificial sequence
  Synthetic oligonucleotide
gtgcctactttctacattta

SEQ ID NO: 1748 - DNA, 20 bp, Artificial sequence
  Synthetic oligonucleotide
gtagtgatttcaaatattga

SEQ ID NO: 1749 - DNA, 20 bp, Artificial sequence
  Synthetic oligonucleotide
acctgcagtaatctccttgc

SEQ ID NO: 1750 - DNA, 20 bp, Artificial sequence
  Synthetic oligonucleotide
ctttactggacttactgtcc

SEQ ID NO: 1751 - DNA, 20 bp, Artificial sequence
  Synthetic oligonucleotide
gcatactaactaccaccaca

SEQ ID NO: 1752 - DNA, 20 bp, Artificial sequence
  Synthetic oligonucleotide
gacatcacccactatgtggt

SEQ ID NO: 1753 - DNA, 20 bp, Artificial sequence
  Synthetic oligonucleotide
gactttgaaacattcctggt

SEQ ID NO: 1754 - DNA, 20 bp, Artificial sequence
  Synthetic oligonucleotide
tgccaattatctgaactgaa

SEQ ID NO: 1755 - DNA, 20 bp, Artificial sequence
  Synthetic oligonucleotide
gactgatatcatcaaaatca

SEQ ID NO: 1756 - DNA, 20 bp, Artificial sequence
  Synthetic oligonucleotide
aaactttatccacccaaact

SEQ ID NO: 1757 - DNA, 20 bp, Artificial sequence
  Synthetic oligonucleotide
ccatttagtcactaccatct

SEQ ID NO: 1758 - DNA, 20 bp, Artificial sequence
  Synthetic oligonucleotide
actccatattactctaaccc

SEQ ID NO: 1759 - DNA, 20 bp, Artificial sequence
  Synthetic oligonucleotide
gcagatttaacttttgactt

SEQ ID NO: 1760 - DNA, 20 bp, Artificial sequence
  Synthetic oligonucleotide
tttatgctcacatgtcacac

SEQ ID NO: 1761 - DNA, 20 bp, Artificial sequence
  Synthetic oligonucleotide
gcctagtataaaacaggtac

SEQ ID NO: 1762 - DNA, 20 bp, Artificial sequence
  Synthetic oligonucleotide
ttcaacacatgatttctcca

SEQ ID NO: 1763 - DNA, 20 bp, Artificial sequence
  Synthetic oligonucleotide
acattcccagatcacttcct

SEQ ID NO: 1764 - DNA, 20 bp, Artificial sequence
  Synthetic oligonucleotide
tgcttatttattaccaatct

SEQ ID NO: 1765 - DNA, 20 bp, Artificial sequence
  Synthetic oligonucleotide
ccgaaactcttactcactcc

SEQ ID NO: 1766 - DNA, 20 bp, Artificial sequence
  Synthetic oligonucleotide
caacacatcaatcacagggt

SEQ ID NO: 1767 - DNA, 20 bp, Artificial sequence
  Synthetic oligonucleotide
ttgctttcatcctcactgac

SEQ ID NO: 1768 - DNA, 20 bp, Artificial sequence
  Synthetic oligonucleotide
tagccacacatttccagtct

SEQ ID NO: 1769 - DNA, 20 bp, Artificial sequence
  Synthetic oligonucleotide
cctagttcatccaagataac

SEQ ID NO: 1770 - DNA, 20 bp, Artificial sequence
  Synthetic oligonucleotide
gcaaccactcttctataatc

SEQ ID NO: 1771 - DNA, 20 bp, Artificial sequence
  Synthetic oligonucleotide
tatctttaagtaatgctcca

SEQ ID NO: 1772 - DNA, 20 bp, Artificial sequence
  Synthetic oligonucleotide
ctgacctgattctgtaggat

SEQ ID NO: 1773 - DNA, 20 bp, Artificial sequence
  Synthetic oligonucleotide
gcataacaattcctctgata

SEQ ID NO: 1774 - DNA, 20 bp, Artificial sequence
  Synthetic oligonucleotide
gccaacatatttatcaaagc

SEQ ID NO: 1775 - DNA, 20 bp, Artificial sequence
  Synthetic oligonucleotide
tgatccagcatatctagtta

SEQ ID NO: 1776 - DNA, 20 bp, Artificial sequence
  Synthetic oligonucleotide
aggtacttactgataaatct

SEQ ID NO: 1777 - DNA, 20 bp, Artificial sequence
  Synthetic oligonucleotide
accaaacttttcctacggga

SEQ ID NO: 1778 - DNA, 20 bp, Artificial sequence
  Synthetic oligonucleotide
tggttatttacaacctcaca

SEQ ID NO: 1779 - DNA, 20 bp, Artificial sequence
  Synthetic oligonucleotide
tagcagctatactcttaact

SEQ ID NO: 1780 - DNA, 20 bp, Artificial sequence
  Synthetic oligonucleotide
aaaactctgtaactgcctgg

SEQ ID NO: 1781 - DNA, 20 bp, Artificial sequence
  Synthetic oligonucleotide
atcagtaaaactcttcgacc

SEQ ID NO: 1782 - DNA, 20 bp, Artificial sequence
  Synthetic oligonucleotide
cacccatcctacaagcaaga

SEQ ID NO: 1783 - DNA, 20 bp, Artificial sequence
  Synthetic oligonucleotide
aggcatctatcctcactttc

SEQ ID NO: 1784 - DNA, 20 bp, Artificial sequence
  Synthetic oligonucleotide
ggttaaggatttcacctaaa

SEQ ID NO: 1785 - DNA, 20 bp, Artificial sequence
  Synthetic oligonucleotide
gtctcttaatttctagggct

SEQ ID NO: 1786 - DNA, 20 bp, Artificial sequence
  Synthetic oligonucleotide
ccataagtttatttccagac

SEQ ID NO: 1787 - DNA, 20 bp, Artificial sequence
  Synthetic oligonucleotide
gctgcttcatttctatgtat

SEQ ID NO: 1788 - DNA, 20 bp, Artificial sequence
  Synthetic oligonucleotide
cctttacccaatcagttggt

SEQ ID NO: 1789 - DNA, 20 bp, Artificial sequence
  Synthetic oligonucleotide
tgaatggagaacttccgata

SEQ ID NO: 1790 - DNA, 20 bp, Artificial sequence
  Synthetic oligonucleotide
atttcaggcttcccgtagac

SEQ ID NO: 1791 - DNA, 20 bp, Artificial sequence
  Synthetic oligonucleotide
ccatccacaatcccaattgt

SEQ ID NO: 1792 - DNA, 20 bp, Artificial sequence
  Synthetic oligonucleotide
caataacaccttgaatttca

SEQ ID NO: 1793 - DNA, 20 bp, Artificial sequence
  Synthetic oligonucleotide
ggtctaaaacccacagcaaa

SEQ ID NO: 1794 - DNA, 20 bp, Artificial sequence
  Synthetic oligonucleotide
aaaagacgacttacctctgc

SEQ ID NO: 1795 - DNA, 20 bp, Artificial sequence
  Synthetic oligonucleotide
ccattaaaaacctgcataac

SEQ ID NO: 1796 - DNA, 20 bp, Artificial sequence
  Synthetic oligonucleotide
tgtgtagcattctaatgatc

SEQ ID NO: 1797 - DNA, 20 bp, Artificial sequence
  Synthetic oligonucleotide
ctaagttaacaatgccagaa

SEQ ID NO: 1798 - DNA, 20 bp, Artificial sequence
  Synthetic oligonucleotide
tgcacacattataacctcat

SEQ ID NO: 1799 - DNA, 20 bp, Artificial sequence
  Synthetic oligonucleotide
ataaatattgagctctcggg

SEQ ID NO: 1800 - DNA, 20 bp, Artificial sequence
  Synthetic oligonucleotide
tggtcatatattaatagctc

SEQ ID NO: 1801 - DNA, 20 bp, Artificial sequence
  Synthetic oligonucleotide
gtaaactcactctagaaaat

SEQ ID NO: 1802 - DNA, 20 bp, Artificial sequence
  Synthetic oligonucleotide
ccgggtttctagctctgaac

SEQ ID NO: 1803 - DNA, 20 bp, Artificial sequence
  Synthetic oligonucleotide
tgcttcacaactcccacctt

SEQ ID NO: 1804 - DNA, 20 bp, Artificial sequence
  Synthetic oligonucleotide
tcctactattcttacctttc

SEQ ID NO: 1805 - DNA, 20 bp, Artificial sequence
  Synthetic oligonucleotide
ccatgacttcctttatgcta

SEQ ID NO: 1806 - DNA, 20 bp, Artificial sequence
  Synthetic oligonucleotide
tggtacttattaacttgttt

SEQ ID NO: 1807 - DNA, 20 bp, Artificial sequence
  Synthetic oligonucleotide
atggtattttatatcagcca

SEQ ID NO: 1808 - DNA, 20 bp, Artificial sequence
  Synthetic oligonucleotide
catgaaatttcaccatcacc

SEQ ID NO: 1809 - DNA, 20 bp, Artificial sequence
  Synthetic oligonucleotide
gccaagattttctattcgat

SEQ ID NO: 1810 - DNA, 20 bp, Artificial sequence
  Synthetic oligonucleotide
ttggccctttgatctatctt

SEQ ID NO: 1811 - DNA, 20 bp, Artificial sequence
  Synthetic oligonucleotide
actgctattttatatcacct

SEQ ID NO: 1812 - DNA, 20 bp, Artificial sequence
  Synthetic oligonucleotide
aatttcatgaccttattcct

SEQ ID NO: 1813 - DNA, 20 bp, Artificial sequence
  Synthetic oligonucleotide
tgggaatttactacttcact

SEQ ID NO: 1814 - DNA, 20 bp, Artificial sequence
  Synthetic oligonucleotide
ctttccacccatgtttggtc

SEQ ID NO: 1815 - DNA, 20 bp, Artificial sequence
  Synthetic oligonucleotide
gtgatttcaaatattgagcc

SEQ ID NO: 1816 - DNA, 20 bp, Artificial sequence
  Synthetic oligonucleotide
acggtattatgactacagca

SEQ ID NO: 1817 - DNA, 20 bp, Artificial sequence
  Synthetic oligonucleotide
cctagtataaaacaggtact

SEQ ID NO: 1818 - DNA, 20 bp, Artificial sequence
  Synthetic oligonucleotide
ccaagattttctattcgatc

SEQ ID NO: 1819 - DNA, 20 bp, Artificial sequence
  Synthetic oligonucleotide
ataacaccttgaatttcatc

SEQ ID NO: 1820 - DNA, 20 bp, Artificial sequence
  Synthetic oligonucleotide
aaagacgacttacctctgca

SEQ ID NO: 1821 - DNA, 20 bp, Artificial sequence
  Synthetic oligonucleotide
ctccattcaagtcatcatct

SEQ ID NO: 1822 - DNA, 20 bp, Artificial sequence
  Synthetic oligonucleotide
tcagtaaaactcttcgacca

SEQ ID NO: 1823 - DNA, 20 bp, Artificial sequence
  Synthetic oligonucleotide
gtatcagtcattatctcatc

SEQ ID NO: 1824 - DNA, 20 bp, Artificial sequence
  Synthetic oligonucleotide
tagtcactaccatctctact

SEQ ID NO: 1825 - DNA, 20 bp, Artificial sequence
  Synthetic oligonucleotide
aaatattgagctctcgggct

SEQ ID NO: 1826 - DNA, 20 bp, Artificial sequence
  Synthetic oligonucleotide
gcagatttttccatagttta

SEQ ID NO: 1827 - DNA, 20 bp, Artificial sequence
  Synthetic oligonucleotide
gtcttatttcaacaacattc

SEQ ID NO: 1828 - DNA, 20 bp, Artificial sequence
  Synthetic oligonucleotide
gaatggagaacttccgatac

SEQ ID NO: 1829 - DNA, 20 bp, Artificial sequence
  Synthetic oligonucleotide
accactcttctataatcgcc

SEQ ID NO: 1830 - DNA, 20 bp, Artificial sequence
  Synthetic oligonucleotide
gtctaaaacccacagcaaac

SEQ ID NO: 1831 - DNA, 20 bp, Artificial sequence
  Synthetic oligonucleotide
ttaaggatttcacctaaagc

SEQ ID NO: 1832 - DNA, 20 bp, Artificial sequence
  Synthetic oligonucleotide
tcagatattctgtacgacct

SEQ ID NO: 1833 - DNA, 20 bp, Artificial sequence
  Synthetic oligonucleotide
acacatcaatcacagggtgc

SEQ ID NO: 1834 - DNA, 20 bp, Artificial sequence
  Synthetic oligonucleotide
aagttaacaatgccagaaat

SEQ ID NO: 1835 - DNA, 20 bp, Artificial sequence
  Synthetic oligonucleotide
atgtcacacaaagataggct

SEQ ID NO: 1836 - DNA, 20 bp, Artificial sequence
  Synthetic oligonucleotide
gttatcacttcattttggca

SEQ ID NO: 1837 - DNA, 20 bp, Artificial sequence
  Synthetic oligonucleotide
cctcatccttatttattcac

SEQ ID NO: 1838 - DNA, 20 bp, Artificial sequence
  Synthetic oligonucleotide
atttcatgaccttattcctt

SEQ ID NO: 1839 - DNA, 20 bp, Artificial sequence
  Synthetic oligonucleotide
ttagtcacatctataccatc

SEQ ID NO: 1840 - DNA, 20 bp, Artificial sequence
  Synthetic oligonucleotide
gtaatcattttatactccta

SEQ ID NO: 1841 - DNA, 20 bp, Artificial sequence
  Synthetic oligonucleotide
tgtattgtaattctagcggc

SEQ ID NO: 1842 - DNA, 20 bp, Artificial sequence
  Synthetic oligonucleotide
ccacacttaacccattcctc

SEQ ID NO: 1843 - DNA, 20 bp, Artificial sequence
  Synthetic oligonucleotide
ctttacccaatcagttggta

SEQ ID NO: 1844 - DNA, 20 bp, Artificial sequence
  Synthetic oligonucleotide
gcttatttattaccaatctc

SEQ ID NO: 1845 - DNA, 20 bp, Artificial sequence
  Synthetic oligonucleotide
agccgggcatttatttccct

SEQ ID NO: 1846 - DNA, 20 bp, Artificial sequence
  Synthetic oligonucleotide
tcagccaattatcatttctc

SEQ ID NO: 1847 - DNA, 20 bp, Artificial sequence
  Synthetic oligonucleotide
actttatccacccaaactgt

SEQ ID NO: 1848 - DNA, 20 bp, Artificial sequence
  Synthetic oligonucleotide
agccaaagctgaccttatat

SEQ ID NO: 1849 - DNA, 20 bp, Artificial sequence
  Synthetic oligonucleotide
gccaattatctgaactgaaa

SEQ ID NO: 1850 - DNA, 20 bp, Artificial sequence
  Synthetic oligonucleotide
agccacacatttccagtctc

SEQ ID NO: 1851 - DNA, 20 bp, Artificial sequence
  Synthetic oligonucleotide
ctcactctagaaaatcaagc

SEQ ID NO: 1852 - DNA, 20 bp, Artificial sequence
  Synthetic oligonucleotide
ccaacatatttatcaaagct

SEQ ID NO: 1853 - DNA, 20 bp, Artificial sequence
  Synthetic oligonucleotide
tctgtaggatttccagattc

SEQ ID NO: 1854 - DNA, 20 bp, Artificial sequence
  Synthetic oligonucleotide
acatgcattatatactacca

SEQ ID NO: 1855 - DNA, 20 bp, Artificial sequence
  Synthetic oligonucleotide
cacacattataacctcatgc

SEQ ID NO: 1856 - DNA, 20 bp, Artificial sequence
  Synthetic oligonucleotide
tcttgatcaccatttctcat

SEQ ID NO: 1857 - DNA, 20 bp, Artificial sequence
  Synthetic oligonucleotide
atgaaatttcaccatcacca

SEQ ID NO: 1858 - DNA, 20 bp, Artificial sequence
  Synthetic oligonucleotide
tcatttcttatccctacatt

SEQ ID NO: 1859 - DNA, 20 bp, Artificial sequence
  Synthetic oligonucleotide
ctgtctttttttaatcccac

SEQ ID NO: 1860 - DNA, 20 bp, Artificial sequence
  Synthetic oligonucleotide
tcatcagatacattacattc

SEQ ID NO: 1861 - DNA, 20 bp, Artificial sequence
  Synthetic oligonucleotide
aactctgtaactgcctggaa

SEQ ID NO: 1862 - DNA, 20 bp, Artificial sequence
  Synthetic oligonucleotide
gcaaattcttattttagggc

SEQ ID NO: 1863 - DNA, 20 bp, Artificial sequence
  Synthetic oligonucleotide
tggtccggtaattatcatta

SEQ ID NO: 1864 - DNA, 20 bp, Artificial sequence
  Synthetic oligonucleotide
atgcaacattctattacttc

SEQ ID NO: 1865 - DNA, 20 bp, Artificial sequence
  Synthetic oligonucleotide
tacttactgataaatctgta

SEQ ID NO: 1866 - DNA, 20 bp, Artificial sequence
  Synthetic oligonucleotide
tttctagctctgaacgagaa

SEQ ID NO: 1867 - DNA, 20 bp, Artificial sequence
  Synthetic oligonucleotide
ttaaaaacctgcataacctt

SEQ ID NO: 1868 - DNA, 20 bp, Artificial sequence
  Synthetic oligonucleotide
gctttcatcctcactgacca

SEQ ID NO: 1869 - DNA, 20 bp, Artificial sequence
  Synthetic oligonucleotide
atcaaagactaacttctctt

SEQ ID NO: 1870 - DNA, 20 bp, Artificial sequence
  Synthetic oligonucleotide
gaatcggctcaaaaccgctt

SEQ ID NO: 1871 - DNA, 20 bp, Artificial sequence
  Synthetic oligonucleotide
ccaaaaaggatatcttctcc

SEQ ID NO: 1872 - DNA, 20 bp, Artificial sequence
  Synthetic oligonucleotide
ccatattactctaaccctgc

SEQ ID NO: 1873 - DNA, 20 bp, Artificial sequence
  Synthetic oligonucleotide
attttaggttcacttacctt

SEQ ID NO: 1874 - DNA, 20 bp, Artificial sequence
  Synthetic oligonucleotide
gttaccagatcatttctact

SEQ ID NO: 1875 - DNA, 20 bp, Artificial sequence
  Synthetic oligonucleotide
attcccagatcacttcctcc

SEQ ID NO: 1876 - DNA, 20 bp, Artificial sequence
  Synthetic oligonucleotide
tagccacatttaatccataa

SEQ ID NO: 1877 - DNA, 20 bp, Artificial sequence
  Synthetic oligonucleotide
cagcaaccttgaaccagcac

SEQ ID NO: 1878 - DNA, 20 bp, Artificial sequence
  Synthetic oligonucleotide
cgttaagaccttattttctt

SEQ ID NO: 1879 - DNA, 20 bp, Artificial sequence
  Synthetic oligonucleotide
tttactggacttactgtcca

SEQ ID NO: 1880 - DNA, 20 bp, Artificial sequence
  Synthetic oligonucleotide
acccatcctacaagcaagat

SEQ ID NO: 1881 - DNA, 20 bp, Artificial sequence
  Synthetic oligonucleotide
cctgcagtaatctccttgct

SEQ ID NO: 1882 - DNA, 20 bp, Artificial sequence
  Synthetic oligonucleotide
aagtaatgctccactggact

SEQ ID NO: 1883 - DNA, 20 bp, Artificial sequence
  Synthetic oligonucleotide
gatatcatcaaaatcagtac

SEQ ID NO: 1884 - DNA, 20 bp, Artificial sequence
  Synthetic oligonucleotide
ctagttcatccaagataacc

SEQ ID NO: 1885 - DNA, 20 bp, Artificial sequence
  Synthetic oligonucleotide
caacagcacctttttcactc

SEQ ID NO: 1886 - DNA, 20 bp, Artificial sequence
  Synthetic oligonucleotide
tgctgaagtccttatccctc

SEQ ID NO: 1887 - DNA, 20 bp, Artificial sequence
  Synthetic oligonucleotide
actttgaaacattcctggtc

SEQ ID NO: 1888 - DNA, 20 bp, Artificial sequence
  Synthetic oligonucleotide
accatgtaagcatttcacca

SEQ ID NO: 1889 - DNA, 20 bp, Artificial sequence
  Synthetic oligonucleotide
gtctcagaataattctactt

SEQ ID NO: 1890 - DNA, 20 bp, Artificial sequence
  Synthetic oligonucleotide
ctgctattttatatcaccta

SEQ ID NO: 1891 - DNA, 20 bp, Artificial sequence
  Synthetic oligonucleotide
gtctttttttaatcccaccc

SEQ ID NO: 1892 - DNA, 20 bp, Artificial sequence
  Synthetic oligonucleotide
tcaaagctttatcttctgga

SEQ ID NO: 1893 - DNA, 20 bp, Artificial sequence
  Synthetic oligonucleotide
aggttcacttaccttcggtc

SEQ ID NO: 1894 - DNA, 20 bp, Artificial sequence
  Synthetic oligonucleotide
acacattataacctcatgca

SEQ ID NO: 1895 - DNA, 20 bp, Artificial sequence
  Synthetic oligonucleotide
tttggcagaactgcaaatct

SEQ ID NO: 1896 - DNA, 20 bp, Artificial sequence
  Synthetic oligonucleotide
ttaccagatcatttctactc

SEQ ID NO: 1897 - DNA, 20 bp, Artificial sequence
  Synthetic oligonucleotide
atcatcaattctcttcatct

SEQ ID NO: 1898 - DNA, 20 bp, Artificial sequence
  Synthetic oligonucleotide
gccagaaataatttgagaac

SEQ ID NO: 1899 - DNA, 20 bp, Artificial sequence
  Synthetic oligonucleotide
gcagagtcctggaaactatc

SEQ ID NO: 1900 - DNA, 20 bp, Artificial sequence
  Synthetic oligonucleotide
gccaaagctgaccttatatc

SEQ ID NO: 1901 - DNA, 20 bp, Artificial sequence
  Synthetic oligonucleotide
aaggatatcttctccaataa

SEQ ID NO: 1902 - DNA, 20 bp, Artificial sequence
  Synthetic oligonucleotide
ttctctttaactatcccctc

SEQ ID NO: 1903 - DNA, 20 bp, Artificial sequence
  Synthetic oligonucleotide
gttgcattactttaacaaga

SEQ ID NO: 1904 - DNA, 20 bp, Artificial sequence
  Synthetic oligonucleotide
ataaaacaggtactcaacct

SEQ ID NO: 1905 - DNA, 20 bp, Artificial sequence
  Synthetic oligonucleotide
caagattttctattcgatca

SEQ ID NO: 1906 - DNA, 20 bp, Artificial sequence
  Synthetic oligonucleotide
agatgcttttggaccgtttg

SEQ ID NO: 1907 - DNA, 20 bp, Artificial sequence
  Synthetic oligonucleotide
aatggagaacttccgataca

SEQ ID NO: 1908 - DNA, 20 bp, Artificial sequence
  Synthetic oligonucleotide
tagtcacatctataccatcc

SEQ ID NO: 1909 - DNA, 20 bp, Artificial sequence
  Synthetic oligonucleotide
taggatttccagattcctta

SEQ ID NO: 1910 - DNA, 20 bp, Artificial sequence
  Synthetic oligonucleotide
cagtttaccggatacttaca

SEQ ID NO: 1911 - DNA, 20 bp, Artificial sequence
  Synthetic oligonucleotide
ctgtactgaaacactattca

SEQ ID NO: 1912 - DNA, 20 bp, Artificial sequence
  Synthetic oligonucleotide
cagtcttaaaaactggagac

SEQ ID NO: 1913 - DNA, 20 bp, Artificial sequence
  Synthetic oligonucleotide
cagtaaaactcttcgaccac

SEQ ID NO: 1914 - DNA, 20 bp, Artificial sequence
  Synthetic oligonucleotide
tcactctagaaaatcaagcc

SEQ ID NO: 1915 - DNA, 20 bp, Artificial sequence
  Synthetic oligonucleotide
acatacacttctctagcatt

SEQ ID NO: 1916 - DNA, 20 bp, Artificial sequence
  Synthetic oligonucleotide
tcagttggtatacaagatac

SEQ ID NO: 1917 - DNA, 20 bp, Artificial sequence
  Synthetic oligonucleotide
tgctgaactcaatttaacct

SEQ ID NO: 1918 - DNA, 20 bp, Artificial sequence
  Synthetic oligonucleotide
cacagcaaacttcctttggt

SEQ ID NO: 1919 - DNA, 20 bp, Artificial sequence
  Synthetic oligonucleotide
ctttcatcctcactgaccaa

SEQ ID NO: 1920 - DNA, 20 bp, Artificial sequence
  Synthetic oligonucleotide
cttgatcaccatttctcata

SEQ ID NO: 1921 - DNA, 20 bp, Artificial sequence
  Synthetic oligonucleotide
atcggctcaaaaccgcttgc

SEQ ID NO: 1922 - DNA, 20 bp, Artificial sequence
  Synthetic oligonucleotide
aggagctacatctacaagcc

SEQ ID NO: 1923 - DNA, 20 bp, Artificial sequence
  Synthetic oligonucleotide
gcctagttatcatcaatatc

SEQ ID NO: 1924 - DNA, 20 bp, Artificial sequence
  Synthetic oligonucleotide
atgtaagcatttcaccagat

SEQ ID NO: 1925 - DNA, 20 bp, Artificial sequence
  Synthetic oligonucleotide
acagggtgccttccattttt

SEQ ID NO: 1926 - DNA, 20 bp, Artificial sequence
  Synthetic oligonucleotide
tccacattttaaaccagtaa

SEQ ID NO: 1927 - DNA, 20 bp, Artificial sequence
  Synthetic oligonucleotide
catgcattatatactaccaa

SEQ ID NO: 1928 - DNA, 20 bp, Artificial sequence
  Synthetic oligonucleotide
tttggaggaatcacttactc

SEQ ID NO: 1929 - DNA, 20 bp, Artificial sequence
  Synthetic oligonucleotide
ttactggacttactgtccat

SEQ ID NO: 1930 - DNA, 20 bp, Artificial sequence
  Synthetic oligonucleotide
accatcaccatgaatatgca

SEQ ID NO: 1931 - DNA, 20 bp, Artificial sequence
  Synthetic oligonucleotide
taaggatttcacctaaagca

SEQ ID NO: 1932 - DNA, 20 bp, Artificial sequence
  Synthetic oligonucleotide
taacaccttgaatttcatcc

SEQ ID NO: 1933 - DNA, 20 bp, Artificial sequence
  Synthetic oligonucleotide
tctgtaattatgtactcctt

SEQ ID NO: 1934 - DNA, 20 bp, Artificial sequence
  Synthetic oligonucleotide
ccatcctacaagcaagatga

SEQ ID NO: 1935 - DNA, 20 bp, Artificial sequence
  Synthetic oligonucleotide
cagtcattatctcatcaaca

SEQ ID NO: 1936 - DNA, 20 bp, Artificial sequence
  Synthetic oligonucleotide
gatttctatcacacttactt

SEQ ID NO: 1937 - DNA, 20 bp, Artificial sequence
  Synthetic oligonucleotide
aagacgacttacctctgcat

SEQ ID NO: 1938 - DNA, 20 bp, Artificial sequence
  Synthetic oligonucleotide
ccaattatctgaactgaaac

SEQ ID NO: 1939 - DNA, 20 bp, Artificial sequence
  Synthetic oligonucleotide
ggtcaagaaatttcactcat

SEQ ID NO: 1940 - DNA, 20 bp, Artificial sequence
  Synthetic oligonucleotide
acttactgataaatctgtat

SEQ ID NO: 1941 - DNA, 20 bp, Artificial sequence
  Synthetic oligonucleotide
gagttcataaattcatcact

SEQ ID NO: 1942 - DNA, 20 bp, Artificial sequence
  Synthetic oligonucleotide
actctgtaactgcctggaaa

SEQ ID NO: 1943 - DNA, 20 bp, Artificial sequence
  Synthetic oligonucleotide
atccacaatcccaattgtcg

SEQ ID NO: 1944 - DNA, 20 bp, Artificial sequence
  Synthetic oligonucleotide
ccacacatttccagtctccc

SEQ ID NO: 1945 - DNA, 20 bp, Artificial sequence
  Synthetic oligonucleotide
ctttatccacccaaactgta

SEQ ID NO: 1946 - DNA, 20 bp, Artificial sequence
  Synthetic oligonucleotide
caggaatttctaaaataacg

SEQ ID NO: 1947 - DNA, 20 bp, Artificial sequence
  Synthetic oligonucleotide
gttggtatttttaattctcc

SEQ ID NO: 1948 - DNA, 20 bp, Artificial sequence
  Synthetic oligonucleotide
ctgacaactccatttatctc

SEQ ID NO: 1949 - DNA, 20 bp, Artificial sequence
  Synthetic oligonucleotide
cttttaccttaatttaagga

SEQ ID NO: 1950 - DNA, 20 bp, Artificial sequence
  Synthetic oligonucleotide
caaattcttattttagggct

SEQ ID NO: 1951 - DNA, 20 bp, Artificial sequence
  Synthetic oligonucleotide
tattacttcatcatttgggc

SEQ ID NO: 1952 - DNA, 20 bp, Artificial sequence
  Synthetic oligonucleotide
tagttcatccaagataacca

SEQ ID NO: 1953 - DNA, 20 bp, Artificial sequence
  Synthetic oligonucleotide
aggttattcttattccccaa

SEQ ID NO: 1954 - DNA, 20 bp, Artificial sequence
  Synthetic oligonucleotide
ggtccggtaattatcattac

SEQ ID NO: 1955 - DNA, 20 bp, Artificial sequence
  Synthetic oligonucleotide
tccaaagatttctacagtgc

SEQ ID NO: 1956 - DNA, 20 bp, Artificial sequence
  Synthetic oligonucleotide
aatctgtttctatcacagtc

SEQ ID NO: 1957 - DNA, 20 bp, Artificial sequence
  Synthetic oligonucleotide
tttcatgaccttattccttc

SEQ ID NO: 1958 - DNA, 20 bp, Artificial sequence
  Synthetic oligonucleotide
aaacctgcataacctttgcc

SEQ ID NO: 1959 - DNA, 20 bp, Artificial sequence
  Synthetic oligonucleotide
tggacatacttttattaggc

SEQ ID NO: 1960 - DNA, 20 bp, Artificial sequence
  Synthetic oligonucleotide
agccacatttaatccataac

SEQ ID NO: 1961 - DNA, 20 bp, Artificial sequence
  Synthetic oligonucleotide
ctttgaaacattcctggtcc

SEQ ID NO: 1962 - DNA, 20 bp, Artificial sequence
  Synthetic oligonucleotide
acagcacctttttcactcca

SEQ ID NO: 1963 - DNA, 20 bp, Artificial sequence
  Synthetic oligonucleotide
ctgcagtaatctccttgctt

SEQ ID NO: 1964 - DNA, 20 bp, Artificial sequence
  Synthetic oligonucleotide
catttcttatccctacattt

SEQ ID NO: 1965 - DNA, 20 bp, Artificial sequence
  Synthetic oligonucleotide
tccattcaagtcatcatctc

SEQ ID NO: 1966 - DNA, 20 bp, Artificial sequence
  Synthetic oligonucleotide
atattgagctctcgggctgc

SEQ ID NO: 1967 - DNA, 20 bp, Artificial sequence
  Synthetic oligonucleotide
ttggaggaatcacttactca

SEQ ID NO: 1968 - DNA, 20 bp, Artificial sequence
  Synthetic oligonucleotide
gtactgactacatactagct

SEQ ID NO: 1969 - DNA, 20 bp, Artificial sequence
  Synthetic oligonucleotide
ggagaacttccgatacagca

SEQ ID NO: 1970 - DNA, 20 bp, Artificial sequence
  Synthetic oligonucleotide
acagcaaacttcctttggtt

SEQ ID NO: 1971 - DNA, 20 bp, Artificial sequence
  Synthetic oligonucleotide
aagtaagcttgacattacct

SEQ ID NO: 1972 - DNA, 20 bp, Artificial sequence
  Synthetic oligonucleotide
tttaccttaatttaaggagt

SEQ ID NO: 1973 - DNA, 20 bp, Artificial sequence
  Synthetic oligonucleotide
ctgatcttatatttaatggc

SEQ ID NO: 1974 - DNA, 20 bp, Artificial sequence
  Synthetic oligonucleotide
agatcccattaatatttgct

SEQ ID NO: 1975 - DNA, 20 bp, Artificial sequence
  Synthetic oligonucleotide
cgggctgcaatctaaaaaat

SEQ ID NO: 1976 - DNA, 20 bp, Artificial sequence
  Synthetic oligonucleotide
accagatcatttctactctt

SEQ ID NO: 1977 - DNA, 20 bp, Artificial sequence
  Synthetic oligonucleotide
agttcataaattcatcactt

SEQ ID NO: 1978 - DNA, 20 bp, Artificial sequence
  Synthetic oligonucleotide
taatctccttgcttagcgac

SEQ ID NO: 1979 - DNA, 20 bp, Artificial sequence
  Synthetic oligonucleotide
tttatccacccaaactgtat

SEQ ID NO: 1980 - DNA, 20 bp, Artificial sequence
  Synthetic oligonucleotide
aaggatttcacctaaagcaa

SEQ ID NO: 1981 - DNA, 20 bp, Artificial sequence
  Synthetic oligonucleotide
cttactgataaatctgtatt

SEQ ID NO: 1982 - DNA, 20 bp, Artificial sequence
  Synthetic oligonucleotide
gtgtaattcctttctcttaa

SEQ ID NO: 1983 - DNA, 20 bp, Artificial sequence
  Synthetic oligonucleotide
ccaaagctgaccttatatcc

SEQ ID NO: 1984 - DNA, 20 bp, Artificial sequence
  Synthetic oligonucleotide
actctatttctttacaggct

SEQ ID NO: 1985 - DNA, 20 bp, Artificial sequence
  Synthetic oligonucleotide
agtcacatctataccatcct

SEQ ID NO: 1986 - DNA, 20 bp, Artificial sequence
  Synthetic oligonucleotide
ttcatgaccttattccttct

SEQ ID NO: 1987 - DNA, 20 bp, Artificial sequence
  Synthetic oligonucleotide
attctcttcatctatcaccc

SEQ ID NO: 1988 - DNA, 20 bp, Artificial sequence
  Synthetic oligonucleotide
agttcatccaagataaccaa

SEQ ID NO: 1989 - DNA, 20 bp, Artificial sequence
  Synthetic oligonucleotide
atacaaccattaatactcca

SEQ ID NO: 1990 - DNA, 20 bp, Artificial sequence
  Synthetic oligonucleotide
gctgaactcaatttaacctt

SEQ ID NO: 1991 - DNA, 20 bp, Artificial sequence
  Synthetic oligonucleotide
gacttccaattatctgcact

SEQ ID NO: 1992 - DNA, 20 bp, Artificial sequence
  Synthetic oligonucleotide
ttaacaggcccatcattttc

SEQ ID NO: 1993 - DNA, 20 bp, Artificial sequence
  Synthetic oligonucleotide
caccacagatctcatgggca

SEQ ID NO: 1994 - DNA, 20 bp, Artificial sequence
  Synthetic oligonucleotide
catgtctattatatccaaca

SEQ ID NO: 1995 - DNA, 20 bp, Artificial sequence
  Synthetic oligonucleotide
gcagcacacatcaagggttc

SEQ ID NO: 1996 - DNA, 20 bp, Artificial sequence
  Synthetic oligonucleotide
agtcctggaaactatcaaac

SEQ ID NO: 1997 - DNA, 20 bp, Artificial sequence
  Synthetic oligonucleotide
agacgacttacctctgcatc

SEQ ID NO: 1998 - DNA, 20 bp, Artificial sequence
  Synthetic oligonucleotide
aaacaggtactcaacctata

SEQ ID NO: 1999 - DNA, 20 bp, Artificial sequence
  Synthetic oligonucleotide
agtcattatctcatcaacat

SEQ ID NO: 2000 - DNA, 20 bp, Artificial sequence
  Synthetic oligonucleotide
ctctgtaactgcctggaaag

SEQ ID NO: 2001 - DNA, 20 bp, Artificial sequence
  Synthetic oligonucleotide
ccacatttcattcaaggtta

SEQ ID NO: 2002 - DNA, 20 bp, Artificial sequence
  Synthetic oligonucleotide
gataaatgctacagagtccc

SEQ ID NO: 2003 - DNA, 20 bp, Artificial sequence
  Synthetic oligonucleotide
accatagtcattcatgttta

SEQ ID NO: 2004 - DNA, 20 bp, Artificial sequence
  Synthetic oligonucleotide
ctaagggcagctttcttcta

SEQ ID NO: 2005 - DNA, 20 bp, Artificial sequence
  Synthetic oligonucleotide
ttgttcacaaatgtagtctt

SEQ ID NO: 2006 - DNA, 20 bp, Artificial sequence
  Synthetic oligonucleotide
aacaccttgaatttcatcct

SEQ ID NO: 2007 - DNA, 20 bp, Artificial sequence
  Synthetic oligonucleotide
ccacaaattccattagctca

SEQ ID NO: 2008 - DNA, 20 bp, Artificial sequence
  Synthetic oligonucleotide
tccacaatcccaattgtcgc

SEQ ID NO: 2009 - DNA, 20 bp, Artificial sequence
  Synthetic oligonucleotide
ctgatatcttatccctgtta

SEQ ID NO: 2010 - DNA, 20 bp, Artificial sequence
  Synthetic oligonucleotide
ttggcagaactgcaaatctc

SEQ ID NO: 2011 - DNA, 20 bp, Artificial sequence
  Synthetic oligonucleotide
gcatatttcattcattagct

SEQ ID NO: 2012 - DNA, 20 bp, Artificial sequence
  Synthetic oligonucleotide
atgcattatatactaccaac

SEQ ID NO: 2013 - DNA, 20 bp, Artificial sequence
  Synthetic oligonucleotide
cttctactccattctactgc

SEQ ID NO: 2014 - DNA, 20 bp, Artificial sequence
  Synthetic oligonucleotide
tcttgattactcactttgta

SEQ ID NO: 2015 - DNA, 20 bp, Artificial sequence
  Synthetic oligonucleotide
gcagcatacacatctatctt

SEQ ID NO: 2016 - DNA, 20 bp, Artificial sequence
  Synthetic oligonucleotide
ttggtatacaagatacagca

SEQ ID NO: 2017 - DNA, 20 bp, Artificial sequence
  Synthetic oligonucleotide
cagggttaaggatttcacat

SEQ ID NO: 2018 - DNA, 20 bp, Artificial sequence
  Synthetic oligonucleotide
cctggtcctcagacatttct

SEQ ID NO: 2019 - DNA, 20 bp, Artificial sequence
  Synthetic oligonucleotide
gacatacttttattaggcaa

SEQ ID NO: 2020 - DNA, 20 bp, Artificial sequence
  Synthetic oligonucleotide
atcaccatttctcatattac

SEQ ID NO: 2021 - DNA, 20 bp, Artificial sequence
  Synthetic oligonucleotide
ggatttccagattccttaat

SEQ ID NO: 2022 - DNA, 20 bp, Artificial sequence
  Synthetic oligonucleotide
actggacttactgtccataa

SEQ ID NO: 2023 - DNA, 20 bp, Artificial sequence
  Synthetic oligonucleotide
ccattcaagtcatcatctca

SEQ ID NO: 2024 - DNA, 20 bp, Artificial sequence
  Synthetic oligonucleotide
gatatcttctccaataagtg

SEQ ID NO: 2025 - DNA, 20 bp, Artificial sequence
  Synthetic oligonucleotide
ggaatttctaaaataacggt

SEQ ID NO: 2026 - DNA, 20 bp, Artificial sequence
  Synthetic oligonucleotide
cactctagaaaatcaagcca

SEQ ID NO: 2027 - DNA, 20 bp, Artificial sequence
  Synthetic oligonucleotide
agggtgccttccatttttta

SEQ ID NO: 2028 - DNA, 20 bp, Artificial sequence
  Synthetic oligonucleotide
acttatctatttctcactga

SEQ ID NO: 2029 - DNA, 20 bp, Artificial sequence
  Synthetic oligonucleotide
agtaaatttttatatcaccc

SEQ ID NO: 2030 - DNA, 20 bp, Artificial sequence
  Synthetic oligonucleotide
aacctgcataacctttgcct

SEQ ID NO: 2031 - DNA, 20 bp, Artificial sequence
  Synthetic oligonucleotide
gccacatttaatccataact

SEQ ID NO: 2032 - DNA, 20 bp, Artificial sequence
  Synthetic oligonucleotide
tcggctcaaaaccgcttgcc

SEQ ID NO: 2033 - DNA, 20 bp, Artificial sequence
  Synthetic oligonucleotide
gatgcttttggaccgtttgt

SEQ ID NO: 2034 - DNA, 20 bp, Artificial sequence
  Synthetic oligonucleotide
gtccggtaattatcattact

SEQ ID NO: 2035 - DNA, 20 bp, Artificial sequence
  Synthetic oligonucleotide
cttgaacttttctatgtatc

SEQ ID NO: 2036 - DNA, 20 bp, Artificial sequence
  Synthetic oligonucleotide
tctgcactcttcttttatac

SEQ ID NO: 2037 - DNA, 20 bp, Artificial sequence
  Synthetic oligonucleotide
ttcatcctcactgaccaaga

SEQ ID NO: 2038 - DNA, 20 bp, Artificial sequence
  Synthetic oligonucleotide
gtaagcatttcaccagattc

SEQ ID NO: 2039 - DNA, 20 bp, Artificial sequence
  Synthetic oligonucleotide
gcagtatgttcactatcaat

SEQ ID NO: 2040 - DNA, 20 bp, Artificial sequence
  Synthetic oligonucleotide
ccgaacattattttatgaac

SEQ ID NO: 2041 - DNA, 20 bp, Artificial sequence
  Synthetic oligonucleotide
tgacaactccatttatctca

SEQ ID NO: 2042 - DNA, 20 bp, Artificial sequence
  Synthetic oligonucleotide
agtaaaactcttcgaccacc

SEQ ID NO: 2043 - DNA, 20 bp, Artificial sequence
  Synthetic oligonucleotide
ctttctttatcatctcactc

SEQ ID NO: 2044 - DNA, 20 bp, Artificial sequence
  Synthetic oligonucleotide
ttgcatttctaaatcctgcc

SEQ ID NO: 2045 - DNA, 20 bp, Artificial sequence
  Synthetic oligonucleotide
ctgccattatcccattctgt

SEQ ID NO: 2046 - DNA, 20 bp, Artificial sequence
  Synthetic oligonucleotide
aggatttcacctaaagcaat

SEQ ID NO: 2047 - DNA, 20 bp, Artificial sequence
  Synthetic oligonucleotide
tcttcagtaacctttggcat

SEQ ID NO: 2048 - DNA, 20 bp, Artificial sequence
  Synthetic oligonucleotide
ggcagaactgcaaatctctc

SEQ ID NO: 2049 - DNA, 20 bp, Artificial sequence
  Synthetic oligonucleotide
tatgtatctatttcttggca

SEQ ID NO: 2050 - DNA, 20 bp, Artificial sequence
  Synthetic oligonucleotide
cggctcaaaaccgcttgcct

SEQ ID NO: 2051 - DNA, 20 bp, Artificial sequence
  Synthetic oligonucleotide
gttggcaataaccacctctc

SEQ ID NO: 2052 - DNA, 20 bp, Artificial sequence
  Synthetic oligonucleotide
actctagaaaatcaagccat

SEQ ID NO: 2053 - DNA, 20 bp, Artificial sequence
  Synthetic oligonucleotide
catggctgtattcaaaataa

SEQ ID NO: 2054 - DNA, 20 bp, Artificial sequence
  Synthetic oligonucleotide
ctcatcaacatttacagcat

SEQ ID NO: 2055 - DNA, 20 bp, Artificial sequence
  Synthetic oligonucleotide
acctgcataacctttgccta

SEQ ID NO: 2056 - DNA, 20 bp, Artificial sequence
  Synthetic oligonucleotide
gacgacttacctctgcatct

SEQ ID NO: 2057 - DNA, 20 bp, Artificial sequence
  Synthetic oligonucleotide
atcatttctactcttcaccc

SEQ ID NO: 2058 - DNA, 20 bp, Artificial sequence
  Synthetic oligonucleotide
ttggttttaacccaaccttc

SEQ ID NO: 2059 - DNA, 20 bp, Artificial sequence
  Synthetic oligonucleotide
ccagattccttaatgttgtt

SEQ ID NO: 2060 - DNA, 20 bp, Artificial sequence
  Synthetic oligonucleotide
gcaagatttatatttaagcc

SEQ ID NO: 2061 - DNA, 20 bp, Artificial sequence
  Synthetic oligonucleotide
ttatccacccaaactgtatt

SEQ ID NO: 2062 - DNA, 20 bp, Artificial sequence
  Synthetic oligonucleotide
aggatttgtacacttaatct

SEQ ID NO: 2063 - DNA, 20 bp, Artificial sequence
  Synthetic oligonucleotide
ttactgataaatctgtatta

SEQ ID NO: 2064 - DNA, 20 bp, Artificial sequence
  Synthetic oligonucleotide
caaagctgaccttatatcct

SEQ ID NO: 2065 - DNA, 20 bp, Artificial sequence
  Synthetic oligonucleotide
aggaaactctttatccaggc

SEQ ID NO: 2066 - DNA, 20 bp, Artificial sequence
  Synthetic oligonucleotide
tgcattatatactaccaaca

SEQ ID NO: 2067 - DNA, 20 bp, Artificial sequence
  Synthetic oligonucleotide
cagcatacacatctatcttt

SEQ ID NO: 2068 - DNA, 20 bp, Artificial sequence
  Synthetic oligonucleotide
ctggacttactgtccataaa

SEQ ID NO: 2069 - DNA, 20 bp, Artificial sequence
  Synthetic oligonucleotide
catgaccttattccttctgt

SEQ ID NO: 2070 - DNA, 20 bp, Artificial sequence
  Synthetic oligonucleotide
gtgggaattaacagcaggta

SEQ ID NO: 2071 - DNA, 20 bp, Artificial sequence
  Synthetic oligonucleotide
gcactcttcttttatacctt

SEQ ID NO: 2072 - DNA, 20 bp, Artificial sequence
  Synthetic oligonucleotide
gaactcaatttaaccttgtc

SEQ ID NO: 2073 - DNA, 20 bp, Artificial sequence
  Synthetic oligonucleotide
gccaatatttacatagagac

SEQ ID NO: 2074 - DNA, 20 bp, Artificial sequence
  Synthetic oligonucleotide
taacaggcccatcattttcc

SEQ ID NO: 2075 - DNA, 20 bp, Artificial sequence
  Synthetic oligonucleotide
cttccatgttgaactcctct

SEQ ID NO: 2076 - DNA, 20 bp, Artificial sequence
  Synthetic oligonucleotide
tccggtaattatcattactc

SEQ ID NO: 2077 - DNA, 20 bp, Artificial sequence
  Synthetic oligonucleotide
cagcaaacttcctttggttt

SEQ ID NO: 2078 - DNA, 20 bp, Artificial sequence
  Synthetic oligonucleotide
atctccttgcttagcgacct

SEQ ID NO: 2079 - DNA, 20 bp, Artificial sequence
  Synthetic oligonucleotide
aagggcagctttcttctagt

SEQ ID NO: 2080 - DNA, 20 bp, Artificial sequence
  Synthetic oligonucleotide
gtttaccggatacttacatc

SEQ ID NO: 2081 - DNA, 20 bp, Artificial sequence
  Synthetic oligonucleotide
acattgtccacacatatgtc

SEQ ID NO: 2082 - DNA, 20 bp, Artificial sequence
  Synthetic oligonucleotide
ccacatttaatccataactc

SEQ ID NO: 2083 - DNA, 20 bp, Artificial sequence
  Synthetic oligonucleotide
atacaagatacagcagagtt

SEQ ID NO: 2084 - DNA, 20 bp, Artificial sequence
  Synthetic oligonucleotide
gaggaatcacttactcaggt

SEQ ID NO: 2085 - DNA, 20 bp, Artificial sequence
  Synthetic oligonucleotide
gtaaatttttatatcaccct

SEQ ID NO: 2086 - DNA, 20 bp, Artificial sequence
  Synthetic oligonucleotide
ccacaatcccaattgtcgct

SEQ ID NO: 2087 - DNA, 20 bp, Artificial sequence
  Synthetic oligonucleotide
ctggaacacagactcatctc

SEQ ID NO: 2088 - DNA, 20 bp, Artificial sequence
  Synthetic oligonucleotide
atatcttctccaataagtgt

SEQ ID NO: 2089 - DNA, 20 bp, Artificial sequence
  Synthetic oligonucleotide
tgtcaaaatttcccttcatc

SEQ ID NO: 2090 - DNA, 20 bp, Artificial sequence
  Synthetic oligonucleotide
tctgatcaatttcatgtctc

SEQ ID NO: 2091 - DNA, 20 bp, Artificial sequence
  Synthetic oligonucleotide
tcatccaagataaccaagga

SEQ ID NO: 2092 - DNA, 20 bp, Artificial sequence
  Synthetic oligonucleotide
tcctggaaactatcaaacac

SEQ ID NO: 2093 - DNA, 20 bp, Artificial sequence
  Synthetic oligonucleotide
gagaacttccgatacagcat

SEQ ID NO: 2094 - DNA, 20 bp, Artificial sequence
  Synthetic oligonucleotide
acaccttgaatttcatcctt

SEQ ID NO: 2095 - DNA, 20 bp, Artificial sequence
  Synthetic oligonucleotide
tcaccatttctcatattacc

SEQ ID NO: 2096 - DNA, 20 bp, Artificial sequence
  Synthetic oligonucleotide
tcatcctcactgaccaagaa

SEQ ID NO: 2097 - DNA, 20 bp, Artificial sequence
  Synthetic oligonucleotide
tacaaccattaatactccaa

SEQ ID NO: 2098 - DNA, 20 bp, Artificial sequence
  Synthetic oligonucleotide
ttatgtatattgatgtaggt

SEQ ID NO: 2099 - DNA, 20 bp, Artificial sequence
  Synthetic oligonucleotide
gccataaatttcatatccta

SEQ ID NO: 2100 - DNA, 20 bp, Artificial sequence
  Synthetic oligonucleotide
attcaagtcatcatctcagt

SEQ ID NO: 2101 - DNA, 20 bp, Artificial sequence
  Synthetic oligonucleotide
aacaggtactcaacctataa

SEQ ID NO: 2102 - DNA, 20 bp, Artificial sequence
  Synthetic oligonucleotide
tgaacatatacttacccaca

SEQ ID NO: 2103 - DNA, 20 bp, Artificial sequence
  Synthetic oligonucleotide
gctgaattcttattacttct

SEQ ID NO: 2104 - DNA, 20 bp, Artificial sequence
  Synthetic oligonucleotide
agctgttaaatcctttgttc

SEQ ID NO: 2105 - DNA, 20 bp, Artificial sequence
  Synthetic oligonucleotide
gcatcttaacaacaacagac

SEQ ID NO: 2106 - DNA, 20 bp, Artificial sequence
  Synthetic oligonucleotide
cttcatctatcacccacttc

SEQ ID NO: 2107 - DNA, 20 bp, Artificial sequence
  Synthetic oligonucleotide
gggtgccttccattttttat

SEQ ID NO: 2108 - DNA, 20 bp, Artificial sequence
  Synthetic oligonucleotide
aatgctacagagtcccctct

SEQ ID NO: 2109 - DNA, 20 bp, Artificial sequence
  Synthetic oligonucleotide
gcactgatttcatacgcaca

SEQ ID NO: 2110 - DNA, 20 bp, Artificial sequence
  Synthetic oligonucleotide
agtaagcttgacattacctc

SEQ ID NO: 2111 - DNA, 20 bp, Artificial sequence
  Synthetic oligonucleotide
ctttatcatctcactcccat

SEQ ID NO: 2112 - DNA, 20 bp, Artificial sequence
  Synthetic oligonucleotide
ttgcacctaatatatctcca

SEQ ID NO: 2113 - DNA, 20 bp, Artificial sequence
  Synthetic oligonucleotide
cgaacattattttatgaaca

SEQ ID NO: 2114 - DNA, 20 bp, Artificial sequence
  Synthetic oligonucleotide
gtaaaactcttcgaccacca

SEQ ID NO: 2115 - DNA, 20 bp, Artificial sequence
  Synthetic oligonucleotide
tgcttttggaccgtttgtta

SEQ ID NO: 2116 - DNA, 20 bp, Artificial sequence
  Synthetic oligonucleotide
ttccacttaaactagcacta

SEQ ID NO: 2117 - DNA, 20 bp, Artificial sequence
  Synthetic oligonucleotide
ggtcaatttttttctcactc

SEQ ID NO: 2118 - DNA, 20 bp, Artificial sequence
  Synthetic oligonucleotide
ctgggtcacccacttcttta

SEQ ID NO: 2119 - DNA, 20 bp, Artificial sequence
  Synthetic oligonucleotide
gtcacatctataccatccta

SEQ ID NO: 2120 - DNA, 20 bp, Artificial sequence
  Synthetic oligonucleotide
tcctcagacatttctttggc

SEQ ID NO: 2121 - DNA, 20 bp, Artificial sequence
  Synthetic oligonucleotide
tatgtttcaatttactaggc

SEQ ID NO: 2122 - DNA, 20 bp, Artificial sequence
  Synthetic oligonucleotide
gctgaactataaattcgaac

SEQ ID NO: 2123 - DNA, 20 bp, Artificial sequence
  Synthetic oligonucleotide
gaattcttattacttctgat

SEQ ID NO: 2124 - DNA, 20 bp, Artificial sequence
  Synthetic oligonucleotide
ctcatttcatctctatccta

SEQ ID NO: 2125 - DNA, 20 bp, Artificial sequence
  Synthetic oligonucleotide
tcaatagtttaccatggctc

SEQ ID NO: 2126 - DNA, 20 bp, Artificial sequence
  Synthetic oligonucleotide
cacaatcccaattgtcgctt

SEQ ID NO: 2127 - DNA, 20 bp, Artificial sequence
  Synthetic oligonucleotide
catcaaacagcttatcacct

SEQ ID NO: 2128 - DNA, 20 bp, Artificial sequence
  Synthetic oligonucleotide
aaatttttatatcaccctcc

SEQ ID NO: 2129 - DNA, 20 bp, Artificial sequence
  Synthetic oligonucleotide
ccagctttatacaccctttc

SEQ ID NO: 2130 - DNA, 20 bp, Artificial sequence
  Synthetic oligonucleotide
tcattagactattttgctca

SEQ ID NO: 2131 - DNA, 20 bp, Artificial sequence
  Synthetic oligonucleotide
tctccttgcttagcgacctt

SEQ ID NO: 2132 - DNA, 20 bp, Artificial sequence
  Synthetic oligonucleotide
tgctacagagtcccctctct

SEQ ID NO: 2133 - DNA, 20 bp, Artificial sequence
  Synthetic oligonucleotide
tgtctaacatcatactgtac

SEQ ID NO: 2134 - DNA, 20 bp, Artificial sequence
  Synthetic oligonucleotide
tgacacaatcatcctaacac

SEQ ID NO: 2135 - DNA, 20 bp, Artificial sequence
  Synthetic oligonucleotide
caccttgaatttcatccttc

SEQ ID NO: 2136 - DNA, 20 bp, Artificial sequence
  Synthetic oligonucleotide
gcaaacttcctttggttttc

SEQ ID NO: 2137 - DNA, 20 bp, Artificial sequence
  Synthetic oligonucleotide
atggctttttcattaaccac

SEQ ID NO: 2138 - DNA, 20 bp, Artificial sequence
  Synthetic oligonucleotide
gtaagcttgacattacctcc

SEQ ID NO: 2139 - DNA, 20 bp, Artificial sequence
  Synthetic oligonucleotide
aaagctgaccttatatcctt

SEQ ID NO: 2140 - DNA, 20 bp, Artificial sequence
  Synthetic oligonucleotide
catccaagataaccaaggac

SEQ ID NO: 2141 - DNA, 20 bp, Artificial sequence
  Synthetic oligonucleotide
taaatgttatccatcctttc

SEQ ID NO: 2142 - DNA, 20 bp, Artificial sequence
  Synthetic oligonucleotide
cctccttcatcatacctact

SEQ ID NO: 2143 - DNA, 20 bp, Artificial sequence
  Synthetic oligonucleotide
aacaggcccatcattttcca

SEQ ID NO: 2144 - DNA, 20 bp, Artificial sequence
  Synthetic oligonucleotide
taaaactcttcgaccaccaa

SEQ ID NO: 2145 - DNA, 20 bp, Artificial sequence
  Synthetic oligonucleotide
ccatgttgaactcctctgtc

SEQ ID NO: 2146 - DNA, 20 bp, Artificial sequence
  Synthetic oligonucleotide
gtggcaaattctctcaagtc

SEQ ID NO: 2147 - DNA, 20 bp, Artificial sequence
  Synthetic oligonucleotide
ccggtaattatcattactct

SEQ ID NO: 2148 - DNA, 20 bp, Artificial sequence
  Synthetic oligonucleotide
caacatttacagcatcatcc

SEQ ID NO: 2149 - DNA, 20 bp, Artificial sequence
  Synthetic oligonucleotide
tgcacctaatatatctccat

SEQ ID NO: 2150 - DNA, 20 bp, Artificial sequence
  Synthetic oligonucleotide
gctgttaaatcctttgttca

SEQ ID NO: 2151 - DNA, 20 bp, Artificial sequence
  Synthetic oligonucleotide
tcaagtcatcatctcagtga

SEQ ID NO: 2152 - DNA, 20 bp, Artificial sequence
  Synthetic oligonucleotide
caggtattattgcttgaaat

SEQ ID NO: 2153 - DNA, 20 bp, Artificial sequence
  Synthetic oligonucleotide
gcagaactgcaaatctctcc

SEQ ID NO: 2154 - DNA, 20 bp, Artificial sequence
  Synthetic oligonucleotide
atgtatctatttcttggcat

SEQ ID NO: 2155 - DNA, 20 bp, Artificial sequence
  Synthetic oligonucleotide
cctgcataacctttgcctat

SEQ ID NO: 2156 - DNA, 20 bp, Artificial sequence
  Synthetic oligonucleotide
gcttttggaccgtttgttag

SEQ ID NO: 2157 - DNA, 20 bp, Artificial sequence
  Synthetic oligonucleotide
ctctagaaaatcaagccatt

SEQ ID NO: 2158 - DNA, 20 bp, Artificial sequence
  Synthetic oligonucleotide
catcctcactgaccaagaat

SEQ ID NO: 2159 - DNA, 20 bp, Artificial sequence
  Synthetic oligonucleotide
actggatttacagactggca

SEQ ID NO: 2160 - DNA, 20 bp, Artificial sequence
  Synthetic oligonucleotide
acaggtactcaacctataaa

SEQ ID NO: 2161 - DNA, 20 bp, Artificial sequence
  Synthetic oligonucleotide
gcattatatactaccaacaa

SEQ ID NO: 2162 - DNA, 20 bp, Artificial sequence
  Synthetic oligonucleotide
tcacctaaagcaataagaca

SEQ ID NO: 2163 - DNA, 20 bp, Artificial sequence
  Synthetic oligonucleotide
tggaacacagactcatctca

SEQ ID NO: 2164 - DNA, 20 bp, Artificial sequence
  Synthetic oligonucleotide
caccatttctcatattacca

SEQ ID NO: 2165 - DNA, 20 bp, Artificial sequence
  Synthetic oligonucleotide
cctggaaactatcaaacaca

SEQ ID NO: 2166 - DNA, 20 bp, Artificial sequence
  Synthetic oligonucleotide
tttaccggatacttacatct

SEQ ID NO: 2167 - DNA, 20 bp, Artificial sequence
  Synthetic oligonucleotide
atgttgttccattaattgtc

SEQ ID NO: 2168 - DNA, 20 bp, Artificial sequence
  Synthetic oligonucleotide
tggcaataaccacctctcca

SEQ ID NO: 2169 - DNA, 20 bp, Artificial sequence
  Synthetic oligonucleotide
cacatttaatccataactcc

SEQ ID NO: 2170 - DNA, 20 bp, Artificial sequence
  Synthetic oligonucleotide
ttactgtccataaaattttc

SEQ ID NO: 2171 - DNA, 20 bp, Artificial sequence
  Synthetic oligonucleotide
gcatacacatctatctttga

SEQ ID NO: 2172 - DNA, 20 bp, Artificial sequence
  Synthetic oligonucleotide
tgcatttctaaatcctgcca

SEQ ID NO: 2173 - DNA, 20 bp, Artificial sequence
  Synthetic oligonucleotide
tctgaaggtacacttcatca

SEQ ID NO: 2174 - DNA, 20 bp, Artificial sequence
  Synthetic oligonucleotide
tatccacccaaactgtattt

SEQ ID NO: 2175 - DNA, 20 bp, Artificial sequence
  Synthetic oligonucleotide
tgaccttattccttctgtgc

SEQ ID NO: 2176 - DNA, 20 bp, Artificial sequence
  Synthetic oligonucleotide
aaagatctatttcctaacac

SEQ ID NO: 2177 - DNA, 20 bp, Artificial sequence
  Synthetic oligonucleotide
gtcaaaatttcccttcatcc

SEQ ID NO: 2178 - DNA, 20 bp, Artificial sequence
  Synthetic oligonucleotide
ggctcaaaaccgcttgcctc

SEQ ID NO: 2179 - DNA, 20 bp, Artificial sequence
  Synthetic oligonucleotide
atgcagataacaatctggta

SEQ ID NO: 2180 - DNA, 20 bp, Artificial sequence
  Synthetic oligonucleotide
aaatctgtattatttgggac

SEQ ID NO: 2181 - DNA, 20 bp, Artificial sequence
  Synthetic oligonucleotide
actgaagatcacttcttgtc

SEQ ID NO: 2182 - DNA, 20 bp, Artificial sequence
  Synthetic oligonucleotide
tgggtcacccacttctttaa

SEQ ID NO: 2183 - DNA, 20 bp, Artificial sequence
  Synthetic oligonucleotide
ttcatgttcatattttggtc

SEQ ID NO: 2184 - DNA, 20 bp, Artificial sequence
  Synthetic oligonucleotide
ccaagtctttacttcccatc

SEQ ID NO: 2185 - DNA, 20 bp, Artificial sequence
  Synthetic oligonucleotide
tatcttctccaataagtgta

SEQ ID NO: 2186 - DNA, 20 bp, Artificial sequence
  Synthetic oligonucleotide
gcactatactcacacatata

SEQ ID NO: 2187 - DNA, 20 bp, Artificial sequence
  Synthetic oligonucleotide
atgtatattgatgtaggtat

SEQ ID NO: 2188 - DNA, 20 bp, Artificial sequence
  Synthetic oligonucleotide
agggcagctttcttctagtc

SEQ ID NO: 2189 - DNA, 20 bp, Artificial sequence
  Synthetic oligonucleotide
tttctactcttcacccttca

SEQ ID NO: 2190 - DNA, 20 bp, Artificial sequence
  Synthetic oligonucleotide
ggaatcacttactcaggttt

SEQ ID NO: 2191 - DNA, 20 bp, Artificial sequence
  Synthetic oligonucleotide
tcacatctataccatcctaa

SEQ ID NO: 2192 - DNA, 20 bp, Artificial sequence
  Synthetic oligonucleotide
agaacttccgatacagcatc

SEQ ID NO: 2193 - DNA, 20 bp, Artificial sequence
  Synthetic oligonucleotide
cttacctctgcatcttcccc

SEQ ID NO: 2194 - DNA, 20 bp, Artificial sequence
  Synthetic oligonucleotide
cttgtcctagtttctccacc

SEQ ID NO: 2195 - DNA, 20 bp, Artificial sequence
  Synthetic oligonucleotide
ccagatttttaaaccaagcc

SEQ ID NO: 2196 - DNA, 20 bp, Artificial sequence
  Synthetic oligonucleotide
gcagcataatcactctgacc

SEQ ID NO: 2197 - DNA, 20 bp, Artificial sequence
  Synthetic oligonucleotide
ccctatgcagaacactttct

SEQ ID NO: 2198 - DNA, 20 bp, Artificial sequence
  Synthetic oligonucleotide
ctgagatagcacctatctcc

SEQ ID NO: 2199 - DNA, 20 bp, Artificial sequence
  Synthetic oligonucleotide
gccatttttaacaagtggca

SEQ ID NO: 2200 - DNA, 20 bp, Artificial sequence
  Synthetic oligonucleotide
catctaacatttgttcctca

SEQ ID NO: 2201 - DNA, 20 bp, Artificial sequence
  Synthetic oligonucleotide
gatctcaccttagttgccca

SEQ ID NO: 2202 - DNA, 20 bp, Artificial sequence
  Synthetic oligonucleotide
ttaccatttctagcaagcaa

SEQ ID NO: 2203 - DNA, 20 bp, Artificial sequence
  Synthetic oligonucleotide
tgtgcatgtatatctatata

SEQ ID NO: 2204 - DNA, 20 bp, Artificial sequence
  Synthetic oligonucleotide
tgtctggtctttttttgctc

SEQ ID NO: 2205 - DNA, 20 bp, Artificial sequence
  Synthetic oligonucleotide
cgtgccccctctgtctactt

SEQ ID NO: 2206 - DNA, 20 bp, Artificial sequence
  Synthetic oligonucleotide
tcatgccaacttgaacctgc

SEQ ID NO: 2207 - DNA, 20 bp, Artificial sequence
  Synthetic oligonucleotide
ccacatgttatcattctgtt

SEQ ID NO: 2208 - DNA, 20 bp, Artificial sequence
  Synthetic oligonucleotide
gcccaggtcctcaagactct

SEQ ID NO: 2209 - DNA, 20 bp, Artificial sequence
  Synthetic oligonucleotide
ctctgccagacatatatcat

SEQ ID NO: 2210 - DNA, 20 bp, Artificial sequence
  Synthetic oligonucleotide
gtaacttatctaactactcc

SEQ ID NO: 2211 - DNA, 20 bp, Artificial sequence
  Synthetic oligonucleotide
attcttgctcctattcccaa

SEQ ID NO: 2212 - DNA, 20 bp, Artificial sequence
  Synthetic oligonucleotide
gtccttatccctctacctca

SEQ ID NO: 2213 - DNA, 20 bp, Artificial sequence
  Synthetic oligonucleotide
caacaatgtataaaaagaaa

SEQ ID NO: 2214 - DNA, 20 bp, Artificial sequence
  Synthetic oligonucleotide
ccctcttcctagttcatcca

SEQ ID NO: 2215 - DNA, 20 bp, Artificial sequence
  Synthetic oligonucleotide
ctctgtccacttctgcaggt

SEQ ID NO: 2216 - DNA, 20 bp, Artificial sequence
  Synthetic oligonucleotide
tgagtaggtatacttgctgt

SEQ ID NO: 2217 - DNA, 20 bp, Artificial sequence
  Synthetic oligonucleotide
gatttgctttagtttcctcc

SEQ ID NO: 2218 - DNA, 20 bp, Artificial sequence
  Synthetic oligonucleotide
tcccagatatagcaagacaa

SEQ ID NO: 2219 - DNA, 20 bp, Artificial sequence
  Synthetic oligonucleotide
gcaggtgactgtcatctgta

SEQ ID NO: 2220 - DNA, 20 bp, Artificial sequence
  Synthetic oligonucleotide
gccactctgtcactgccaac

SEQ ID NO: 2221 - DNA, 20 bp, Artificial sequence
  Synthetic oligonucleotide
tccactacttgtatctcttc

SEQ ID NO: 2222 - DNA, 20 bp, Artificial sequence
  Synthetic oligonucleotide
gccttgtcctagtttctcca

SEQ ID NO: 2223 - DNA, 20 bp, Artificial sequence
  Synthetic oligonucleotide
ctccataatccatccatgtt

SEQ ID NO: 2224 - DNA, 20 bp, Artificial sequence
  Synthetic oligonucleotide
agcagatttttccatagttt

SEQ ID NO: 2225 - DNA, 20 bp, Artificial sequence
  Synthetic oligonucleotide
tgctacctcatcactctcta

SEQ ID NO: 2226 - DNA, 20 bp, Artificial sequence
  Synthetic oligonucleotide
cagttgcctcctccctcata

SEQ ID NO: 2227 - DNA, 20 bp, Artificial sequence
  Synthetic oligonucleotide
gctctgctcactaggatcca

SEQ ID NO: 2228 - DNA, 20 bp, Artificial sequence
  Synthetic oligonucleotide
gcttagtgttttattctgct

SEQ ID NO: 2229 - DNA, 20 bp, Artificial sequence
  Synthetic oligonucleotide
tggctttcttagtaagccct

SEQ ID NO: 2230 - DNA, 20 bp, Artificial sequence
  Synthetic oligonucleotide
aagcatttatttcaaaggtc

SEQ ID NO: 2231 - DNA, 20 bp, Artificial sequence
  Synthetic oligonucleotide
gcattgctgaattcttatta

SEQ ID NO: 2232 - DNA, 20 bp, Artificial sequence
  Synthetic oligonucleotide
atgacttcatatgaacccac

SEQ ID NO: 2233 - DNA, 20 bp, Artificial sequence
  Synthetic oligonucleotide
ttgcccatcatgattttcca

SEQ ID NO: 2234 - DNA, 20 bp, Artificial sequence
  Synthetic oligonucleotide
ttctaagtatctctgttcaa

SEQ ID NO: 2235 - DNA, 20 bp, Artificial sequence
  Synthetic oligonucleotide
gttctcttcaccatcacacc

SEQ ID NO: 2236 - DNA, 20 bp, Artificial sequence
  Synthetic oligonucleotide
cggcaggacagattctcagc

SEQ ID NO: 2237 - DNA, 20 bp, Artificial sequence
  Synthetic oligonucleotide
cgcttagtccaatatgcaaa

SEQ ID NO: 2238 - DNA, 20 bp, Artificial sequence
  Synthetic oligonucleotide
tgctatgcttcacttccaat

SEQ ID NO: 2239 - DNA, 20 bp, Artificial sequence
  Synthetic oligonucleotide
tacatgtttatctctctata

SEQ ID NO: 2240 - DNA, 20 bp, Artificial sequence
  Synthetic oligonucleotide
atggtatatacacaggactc

SEQ ID NO: 2241 - DNA, 20 bp, Artificial sequence
  Synthetic oligonucleotide
tcaccatagcaacagttcta

SEQ ID NO: 2242 - DNA, 20 bp, Artificial sequence
  Synthetic oligonucleotide
ccctatctatcgccaagtcc

SEQ ID NO: 2243 - DNA, 20 bp, Artificial sequence
  Synthetic oligonucleotide
gtatcatttcatcatctgca

SEQ ID NO: 2244 - DNA, 20 bp, Artificial sequence
  Synthetic oligonucleotide
gcataactccacctctgtgc

SEQ ID NO: 2245 - DNA, 20 bp, Artificial sequence
  Synthetic oligonucleotide
gatcatttctactcttcacc

SEQ ID NO: 2246 - DNA, 20 bp, Artificial sequence
  Synthetic oligonucleotide
ttaccattttagcatttctt

SEQ ID NO: 2247 - DNA, 20 bp, Artificial sequence
  Synthetic oligonucleotide
atgctttcaccgtctggtac

SEQ ID NO: 2248 - DNA, 20 bp, Artificial sequence
  Synthetic oligonucleotide
gccatggaactctaattcta

SEQ ID NO: 2249 - DNA, 20 bp, Artificial sequence
  Synthetic oligonucleotide
gctgcttgccatcatgcgca

SEQ ID NO: 2250 - DNA, 20 bp, Artificial sequence
  Synthetic oligonucleotide
ttgactccctattctgtcct

SEQ ID NO: 2251 - DNA, 20 bp, Artificial sequence
  Synthetic oligonucleotide
ccccagacagtctctcagtc

SEQ ID NO: 2252 - DNA, 20 bp, Artificial sequence
  Synthetic oligonucleotide
atgtctttcaactaccataa

SEQ ID NO: 2253 - DNA, 20 bp, Artificial sequence
  Synthetic oligonucleotide
gtctaccctttccaaccttc

SEQ ID NO: 2254 - DNA, 20 bp, Artificial sequence
  Synthetic oligonucleotide
ataggccttcaccctttctt

SEQ ID NO: 2255 - DNA, 20 bp, Artificial sequence
  Synthetic oligonucleotide
acttctgacaacagcaaggc

SEQ ID NO: 2256 - DNA, 20 bp, Artificial sequence
  Synthetic oligonucleotide
aagatgcttgtttccagcca

SEQ ID NO: 2257 - DNA, 20 bp, Artificial sequence
  Synthetic oligonucleotide
tggatccctaccatgtacta

SEQ ID NO: 2258 - DNA, 20 bp, Artificial sequence
  Synthetic oligonucleotide
cagttactctgttccagcac

SEQ ID NO: 2259 - DNA, 20 bp, Artificial sequence
  Synthetic oligonucleotide
gtgcatattctccctattgc

SEQ ID NO: 2260 - DNA, 20 bp, Artificial sequence
  Synthetic oligonucleotide
tgctggccaatactgaggct

SEQ ID NO: 2261 - DNA, 20 bp, Artificial sequence
  Synthetic oligonucleotide
ttggcaccaaaactctgcta

SEQ ID NO: 2262 - DNA, 20 bp, Artificial sequence
  Synthetic oligonucleotide
cctcatcagtttcccatgtc

SEQ ID NO: 2263 - DNA, 20 bp, Artificial sequence
  Synthetic oligonucleotide
tgctgtttcttcctattcga

SEQ ID NO: 2264 - DNA, 20 bp, Artificial sequence
  Synthetic oligonucleotide
ctgttcctacttgcctgtta

SEQ ID NO: 2265 - DNA, 20 bp, Artificial sequence
  Synthetic oligonucleotide
gacaactgtccttcctccac

SEQ ID NO: 2266 - DNA, 20 bp, Artificial sequence
  Synthetic oligonucleotide
tctggctcatactcttgcat

SEQ ID NO: 2267 - DNA, 20 bp, Artificial sequence
  Synthetic oligonucleotide
tccaatagagacccctcact

SEQ ID NO: 2268 - DNA, 20 bp, Artificial sequence
  Synthetic oligonucleotide
acactccacaattccaagcc

SEQ ID NO: 2269 - DNA, 20 bp, Artificial sequence
  Synthetic oligonucleotide
tgagtatcatctctgctctc

SEQ ID NO: 2270 - DNA, 20 bp, Artificial sequence
  Synthetic oligonucleotide
agccgagtaattcattctct

SEQ ID NO: 2271 - DNA, 20 bp, Artificial sequence
  Synthetic oligonucleotide
cctagagcactaagttttca

SEQ ID NO: 2272 - DNA, 20 bp, Artificial sequence
  Synthetic oligonucleotide
tcctaacactccagtcaact

SEQ ID NO: 2273 - DNA, 20 bp, Artificial sequence
  Synthetic oligonucleotide
gtgcaaatctcctcttactc

SEQ ID NO: 2274 - DNA, 20 bp, Artificial sequence
  Synthetic oligonucleotide
ctggcattcattcttccagt

SEQ ID NO: 2275 - DNA, 20 bp, Artificial sequence
  Synthetic oligonucleotide
gcctctcaaagacatagtct

SEQ ID NO: 2276 - DNA, 20 bp, Artificial sequence
  Synthetic oligonucleotide
tgcatgtatatctatataaa

SEQ ID NO: 2277 - DNA, 20 bp, Artificial sequence
  Synthetic oligonucleotide
gctacctcatcactctctag

SEQ ID NO: 2278 - DNA, 20 bp, Artificial sequence
  Synthetic oligonucleotide
tgcctcctccctcatatgaa

SEQ ID NO: 2279 - DNA, 20 bp, Artificial sequence
  Synthetic oligonucleotide
cccatctcttgcatacagct

SEQ ID NO: 2280 - DNA, 20 bp, Artificial sequence
  Synthetic oligonucleotide
ttgctccaacatgtttcctt

SEQ ID NO: 2281 - DNA, 20 bp, Artificial sequence
  Synthetic oligonucleotide
tgaattcttattacttctga

SEQ ID NO: 2282 - DNA, 20 bp, Artificial sequence
  Synthetic oligonucleotide
gtctgcagcacccatcctac

SEQ ID NO: 2283 - DNA, 20 bp, Artificial sequence
  Synthetic oligonucleotide
ccgagtaattcattctctcc

SEQ ID NO: 2284 - DNA, 20 bp, Artificial sequence
  Synthetic oligonucleotide
ctaacatttgttcctcacct

SEQ ID NO: 2285 - DNA, 20 bp, Artificial sequence
  Synthetic oligonucleotide
acctaagtttcagaatcggt

SEQ ID NO: 2286 - DNA, 20 bp, Artificial sequence
  Synthetic oligonucleotide
gtataaaaagaaaaacagac

SEQ ID NO: 2287 - DNA, 20 bp, Artificial sequence
  Synthetic oligonucleotide
ccaaaggctttatctgttct

SEQ ID NO: 2288 - DNA, 20 bp, Artificial sequence
  Synthetic oligonucleotide
ctgttagatccatttatcaa

SEQ ID NO: 2289 - DNA, 20 bp, Artificial sequence
  Synthetic oligonucleotide
agctcctcccactagtgccc

SEQ ID NO: 2290 - DNA, 20 bp, Artificial sequence
  Synthetic oligonucleotide
cctttcctcacacagcttta

SEQ ID NO: 2291 - DNA, 20 bp, Artificial sequence
  Synthetic oligonucleotide
gctgtttcttcctattcgac

SEQ ID NO: 2292 - DNA, 20 bp, Artificial sequence
  Synthetic oligonucleotide
ggtggattttctcactcttt

SEQ ID NO: 2293 - DNA, 20 bp, Artificial sequence
  Synthetic oligonucleotide
cctcaagactctaatttgct

SEQ ID NO: 2294 - DNA, 20 bp, Artificial sequence
  Synthetic oligonucleotide
cttcctccacatcagcagcc

SEQ ID NO: 2295 - DNA, 20 bp, Artificial sequence
  Synthetic oligonucleotide
tgctttcatcctcactgacc

SEQ ID NO: 2296 - DNA, 20 bp, Artificial sequence
  Synthetic oligonucleotide
agcacatgtaatttttggca

SEQ ID NO: 2297 - DNA, 20 bp, Artificial sequence
  Synthetic oligonucleotide
gcttagtccaatatgcaaat

SEQ ID NO: 2298 - DNA, 20 bp, Artificial sequence
  Synthetic oligonucleotide
gttttattctgctatctgta

SEQ ID NO: 2299 - DNA, 20 bp, Artificial sequence
  Synthetic oligonucleotide
catgccaacttgaacctgct

SEQ ID NO: 2300 - DNA, 20 bp, Artificial sequence
  Synthetic oligonucleotide
atgcttgtttccagccacta

SEQ ID NO: 2301 - DNA, 20 bp, Artificial sequence
  Synthetic oligonucleotide
tgacttcatatgaacccaca

SEQ ID NO: 2302 - DNA, 20 bp, Artificial sequence
  Synthetic oligonucleotide
ggtggtactatgcctccgca

SEQ ID NO: 2303 - DNA, 20 bp, Artificial sequence
  Synthetic oligonucleotide
tcccatgactgttatctctc

SEQ ID NO: 2304 - DNA, 20 bp, Artificial sequence
  Synthetic oligonucleotide
gttccctgtatagaagccta

SEQ ID NO: 2305 - DNA, 20 bp, Artificial sequence
  Synthetic oligonucleotide
acattccatctcaactgtcc

SEQ ID NO: 2306 - DNA, 20 bp, Artificial sequence
  Synthetic oligonucleotide
acatgtttatctctctatat

SEQ ID NO: 2307 - DNA, 20 bp, Artificial sequence
  Synthetic oligonucleotide
gttcagatgattctccagta

SEQ ID NO: 2308 - DNA, 20 bp, Artificial sequence
  Synthetic oligonucleotide
cctatgcagaacactttctt

SEQ ID NO: 2309 - DNA, 20 bp, Artificial sequence
  Synthetic oligonucleotide
ttctactccattctactgca

SEQ ID NO: 2310 - DNA, 20 bp, Artificial sequence
  Synthetic oligonucleotide
tcatcatgttgcaacatgta

SEQ ID NO: 2311 - DNA, 20 bp, Artificial sequence
  Synthetic oligonucleotide
tggctcatactcttgcatgc

SEQ ID NO: 2312 - DNA, 20 bp, Artificial sequence
  Synthetic oligonucleotide
agtcaattcttacaagcagc

SEQ ID NO: 2313 - DNA, 20 bp, Artificial sequence
  Synthetic oligonucleotide
gttccagcacacagactact

SEQ ID NO: 2314 - DNA, 20 bp, Artificial sequence
  Synthetic oligonucleotide
agtgcagtccagcaaacctc

SEQ ID NO: 2315 - DNA, 20 bp, Artificial sequence
  Synthetic oligonucleotide
tcgcttatttttcatagtgt

SEQ ID NO: 2316 - DNA, 20 bp, Artificial sequence
  Synthetic oligonucleotide
atcatgattttccacggtaa

SEQ ID NO: 2317 - DNA, 20 bp, Artificial sequence
  Synthetic oligonucleotide
cccagacagtctctcagtca

SEQ ID NO: 2318 - DNA, 20 bp, Artificial sequence
  Synthetic oligonucleotide
tgttgtgattacatactaca

SEQ ID NO: 2319 - DNA, 20 bp, Artificial sequence
  Synthetic oligonucleotide
gctttagtttcctcctacca

SEQ ID NO: 2320 - DNA, 20 bp, Artificial sequence
  Synthetic oligonucleotide
agtgtccttgtcctctgcct

SEQ ID NO: 2321 - DNA, 20 bp, Artificial sequence
  Synthetic oligonucleotide
cagcaaggcattatctagga

SEQ ID NO: 2322 - DNA, 20 bp, Artificial sequence
  Synthetic oligonucleotide
gctcaggatgtcatcagccc

SEQ ID NO: 2323 - DNA, 20 bp, Artificial sequence
  Synthetic oligonucleotide
attcagctactctcgcatgc

SEQ ID NO: 2324 - DNA, 20 bp, Artificial sequence
  Synthetic oligonucleotide
ctgccagacatatatcataa

SEQ ID NO: 2325 - DNA, 20 bp, Artificial sequence
  Synthetic oligonucleotide
taccattttagcatttctta

SEQ ID NO: 2326 - DNA, 20 bp, Artificial sequence
  Synthetic oligonucleotide
gagatagcacctatctcccc

SEQ ID NO: 2327 - DNA, 20 bp, Artificial sequence
  Synthetic oligonucleotide
gaacacagtatttcaccgtt

SEQ ID NO: 2328 - DNA, 20 bp, Artificial sequence
  Synthetic oligonucleotide
gtatctcttcctccttacta

SEQ ID NO: 2329 - DNA, 20 bp, Artificial sequence
  Synthetic oligonucleotide
gtctggacatatctttggac

SEQ ID NO: 2330 - DNA, 20 bp, Artificial sequence
  Synthetic oligonucleotide
gccatgtctgcctccgatcc

SEQ ID NO: 2331 - DNA, 20 bp, Artificial sequence
  Synthetic oligonucleotide
tgccccctctgtctacttac

SEQ ID NO: 2332 - DNA, 20 bp, Artificial sequence
  Synthetic oligonucleotide
gctggccaatactgaggctt

SEQ ID NO: 2333 - DNA, 20 bp, Artificial sequence
  Synthetic oligonucleotide
gccactattacctttgtgcc

SEQ ID NO: 2334 - DNA, 20 bp, Artificial sequence
  Synthetic oligonucleotide
gagacccctcactttttccc

SEQ ID NO: 2335 - DNA, 20 bp, Artificial sequence
  Synthetic oligonucleotide
caccctttctttctcaattc

SEQ ID NO: 2336 - DNA, 20 bp, Artificial sequence
  Synthetic oligonucleotide
tcctcttactcagcatcaca

SEQ ID NO: 2337 - DNA, 20 bp, Artificial sequence
  Synthetic oligonucleotide
tcttgctcctattcccaact

SEQ ID NO: 2338 - DNA, 20 bp, Artificial sequence
  Synthetic oligonucleotide
cagcaagcataccatgtaac

SEQ ID NO: 2339 - DNA, 20 bp, Artificial sequence
  Synthetic oligonucleotide
taagtcattcttgcactgca

SEQ ID NO: 2340 - DNA, 20 bp, Artificial sequence
  Synthetic oligonucleotide
cctaacactccagtcaactc

SEQ ID NO: 2341 - DNA, 20 bp, Artificial sequence
  Synthetic oligonucleotide
tcctggtgatttatttccca

SEQ ID NO: 2342 - DNA, 20 bp, Artificial sequence
  Synthetic oligonucleotide
atctaactactccaaacctt

SEQ ID NO: 2343 - DNA, 20 bp, Artificial sequence
  Synthetic oligonucleotide
tcgaggctccagtcctgcca

SEQ ID NO: 2344 - DNA, 20 bp, Artificial sequence
  Synthetic oligonucleotide
ctcgacatagagtaatacta

SEQ ID NO: 2345 - DNA, 20 bp, Artificial sequence
  Synthetic oligonucleotide
tgtcctagtttctccaccta

SEQ ID NO: 2346 - DNA, 20 bp, Artificial sequence
  Synthetic oligonucleotide
ctagcaagcaatcaagagct

SEQ ID NO: 2347 - DNA, 20 bp, Artificial sequence
  Synthetic oligonucleotide
atgcttcacttccaatatct

SEQ ID NO: 2348 - DNA, 20 bp, Artificial sequence
  Synthetic oligonucleotide
ttccaaccttcttctgtgca

SEQ ID NO: 2349 - DNA, 20 bp, Artificial sequence
  Synthetic oligonucleotide
acctagacagtttctctcct

SEQ ID NO: 2350 - DNA, 20 bp, Artificial sequence
  Synthetic oligonucleotide
actgtggtaccacaggacat

SEQ ID NO: 2351 - DNA, 20 bp, Artificial sequence
  Synthetic oligonucleotide
ggcttgttcctgctaaggtc

SEQ ID NO: 2352 - DNA, 20 bp, Artificial sequence
  Synthetic oligonucleotide
tgttgaagtatccacaccct

SEQ ID NO: 2353 - DNA, 20 bp, Artificial sequence
  Synthetic oligonucleotide
attcttattacttctgataa

SEQ ID NO: 2354 - DNA, 20 bp, Artificial sequence
  Synthetic oligonucleotide
gttccagtgacctaacttca

SEQ ID NO: 2355 - DNA, 20 bp, Artificial sequence
  Synthetic oligonucleotide
gctgtgtgcatataggatct

SEQ ID NO: 2356 - DNA, 20 bp, Artificial sequence
  Synthetic oligonucleotide
tgtccacacatatgtctgcc

SEQ ID NO: 2357 - DNA, 20 bp, Artificial sequence
  Synthetic oligonucleotide
gttccaattgtcactaagca

SEQ ID NO: 2358 - DNA, 20 bp, Artificial sequence
  Synthetic oligonucleotide
tgctccctaggatttgcttc

SEQ ID NO: 2359 - DNA, 20 bp, Artificial sequence
  Synthetic oligonucleotide
gtcatcttttatcaaaggtc

SEQ ID NO: 2360 - DNA, 20 bp, Artificial sequence
  Synthetic oligonucleotide
aagtcattcttgcactgcat

SEQ ID NO: 2361 - DNA, 20 bp, Artificial sequence
  Synthetic oligonucleotide
ctggagatttcttccctgga

SEQ ID NO: 2362 - DNA, 20 bp, Artificial sequence
  Synthetic oligonucleotide
gctcctcccactagtgccca

SEQ ID NO: 2363 - DNA, 20 bp, Artificial sequence
  Synthetic oligonucleotide
ctccagtcaactcgatgttc

SEQ ID NO: 2364 - DNA, 20 bp, Artificial sequence
  Synthetic oligonucleotide
ggtaccacaggacattcttc

SEQ ID NO: 2365 - DNA, 20 bp, Artificial sequence
  Synthetic oligonucleotide
ctgcagcacccatcctacaa

SEQ ID NO: 2366 - DNA, 20 bp, Artificial sequence
  Synthetic oligonucleotide
tataaaaagaaaaacagacc

SEQ ID NO: 2367 - DNA, 20 bp, Artificial sequence
  Synthetic oligonucleotide
gtggtactatgcctccgcat

SEQ ID NO: 2368 - DNA, 20 bp, Artificial sequence
  Synthetic oligonucleotide
tgccactcatgaacaccaca

SEQ ID NO: 2369 - DNA, 20 bp, Artificial sequence
  Synthetic oligonucleotide
ctccaacatgtttccttaac

SEQ ID NO: 2370 - DNA, 20 bp, Artificial sequence
  Synthetic oligonucleotide
cattttagcatttcttaggt

SEQ ID NO: 2371 - DNA, 20 bp, Artificial sequence
  Synthetic oligonucleotide
gcatgtatatctatataaac

SEQ ID NO: 2372 - DNA, 20 bp, Artificial sequence
  Synthetic oligonucleotide
gctgccttactcagaagttt

SEQ ID NO: 2373 - DNA, 20 bp, Artificial sequence
  Synthetic oligonucleotide
gctgttttgcataatgtctt

SEQ ID NO: 2374 - DNA, 20 bp, Artificial sequence
  Synthetic oligonucleotide
ctacctcatcactctctagt

SEQ ID NO: 2375 - DNA, 20 bp, Artificial sequence
  Synthetic oligonucleotide
gccaccttgtcactgagact

SEQ ID NO: 2376 - DNA, 20 bp, Artificial sequence
  Synthetic oligonucleotide
gcggttgccactgctgttaa

SEQ ID NO: 2377 - DNA, 20 bp, Artificial sequence
  Synthetic oligonucleotide
ccagcacacagactacttgc

SEQ ID NO: 2378 - DNA, 20 bp, Artificial sequence
  Synthetic oligonucleotide
gcacttgaaatgtcatggct

SEQ ID NO: 2379 - DNA, 20 bp, Artificial sequence
  Synthetic oligonucleotide
aacacagtatttcaccgttt

SEQ ID NO: 2380 - DNA, 20 bp, Artificial sequence
  Synthetic oligonucleotide
gccccctctgtctacttact

SEQ ID NO: 2381 - DNA, 20 bp, Artificial sequence
  Synthetic oligonucleotide
tgccaacttgaacctgctcc

SEQ ID NO: 2382 - DNA, 20 bp, Artificial sequence
  Synthetic oligonucleotide
gcagcaatttttcagttata

SEQ ID NO: 2383 - DNA, 20 bp, Artificial sequence
  Synthetic oligonucleotide
caccagtcaatgaatgctgc

SEQ ID NO: 2384 - DNA, 20 bp, Artificial sequence
  Synthetic oligonucleotide
tcagcatcacaaaggtgcac

SEQ ID NO: 2385 - DNA, 20 bp, Artificial sequence
  Synthetic oligonucleotide
ctgtgcttgtattaattctc

SEQ ID NO: 2386 - DNA, 20 bp, Artificial sequence
  Synthetic oligonucleotide
gcctccttgcatgacccctc

SEQ ID NO: 2387 - DNA, 20 bp, Artificial sequence
  Synthetic oligonucleotide
gcttgttcctgctaaggtct

SEQ ID NO: 2388 - DNA, 20 bp, Artificial sequence
  Synthetic oligonucleotide
atagaactgtaacactgcaa

SEQ ID NO: 2389 - DNA, 20 bp, Artificial sequence
  Synthetic oligonucleotide
tatgcatataacacatttta

SEQ ID NO: 2390 - DNA, 20 bp, Artificial sequence
  Synthetic oligonucleotide
gttccaattactgctccacc

SEQ ID NO: 2391 - DNA, 20 bp, Artificial sequence
  Synthetic oligonucleotide
cctggtgatttatttcccaa

SEQ ID NO: 2392 - DNA, 20 bp, Artificial sequence
  Synthetic oligonucleotide
gtcaattcttacaagcagct

SEQ ID NO: 2393 - DNA, 20 bp, Artificial sequence
  Synthetic oligonucleotide
catgtttatctctctatata

SEQ ID NO: 2394 - DNA, 20 bp, Artificial sequence
  Synthetic oligonucleotide
ctggacatatctttggacat

SEQ ID NO: 2395 - DNA, 20 bp, Artificial sequence
  Synthetic oligonucleotide
tctactccattctactgcat

SEQ ID NO: 2396 - DNA, 20 bp, Artificial sequence
  Synthetic oligonucleotide
gtctcatgaaacttttcata

SEQ ID NO: 2397 - DNA, 20 bp, Artificial sequence
  Synthetic oligonucleotide
ttgtgattacatactacagc

SEQ ID NO: 2398 - DNA, 20 bp, Artificial sequence
  Synthetic oligonucleotide
tcctattcccaactattggc

SEQ ID NO: 2399 - DNA, 20 bp, Artificial sequence
  Synthetic oligonucleotide
acctggctttaatatctcca

SEQ ID NO: 2400 - DNA, 20 bp, Artificial sequence
  Synthetic oligonucleotide
taactactccaaaccttggt

SEQ ID NO: 2401 - DNA, 20 bp, Artificial sequence
  Synthetic oligonucleotide
atgcagaacactttcttggt

SEQ ID NO: 2402 - DNA, 20 bp, Artificial sequence
  Synthetic oligonucleotide
tgccagacatatatcataac

SEQ ID NO: 2403 - DNA, 20 bp, Artificial sequence
  Synthetic oligonucleotide
caaaggctttatctgttcta

SEQ ID NO: 2404 - DNA, 20 bp, Artificial sequence
  Synthetic oligonucleotide
tcagctactctcgcatgcta

SEQ ID NO: 2405 - DNA, 20 bp, Artificial sequence
  Synthetic oligonucleotide
ggtttctacctccacctggc

SEQ ID NO: 2406 - DNA, 20 bp, Artificial sequence
  Synthetic oligonucleotide
ggcaaacattttcctacagc

SEQ ID NO: 2407 - DNA, 20 bp, Artificial sequence
  Synthetic oligonucleotide
gtgcagtccagcaaacctcc

SEQ ID NO: 2408 - DNA, 20 bp, Artificial sequence
  Synthetic oligonucleotide
cctagacagtttctctcctt

SEQ ID NO: 2409 - DNA, 20 bp, Artificial sequence
  Synthetic oligonucleotide
ctctcatgagcctctggcca

SEQ ID NO: 2410 - DNA, 20 bp, Artificial sequence
  Synthetic oligonucleotide
ttcctcctaccatgacagcc

SEQ ID NO: 2411 - DNA, 20 bp, Artificial sequence
  Synthetic oligonucleotide
tcatcagcccaaaagtggtt

SEQ ID NO: 2412 - DNA, 20 bp, Artificial sequence
  Synthetic oligonucleotide
gtagcctgcacatatccctc

SEQ ID NO: 2413 - DNA, 20 bp, Artificial sequence
  Synthetic oligonucleotide
cgggcatccaagaatcctct

SEQ ID NO: 2414 - DNA, 20 bp, Artificial sequence
  Synthetic oligonucleotide
tccccttcaataccttggcc

SEQ ID NO: 2415 - DNA, 20 bp, Artificial sequence
  Synthetic oligonucleotide
agctttgtacacacacgggc

SEQ ID NO: 2416 - DNA, 20 bp, Artificial sequence
  Synthetic oligonucleotide
gagctgatgcaccctggatc

SEQ ID NO: 2417 - DNA, 20 bp, Artificial sequence
  Synthetic oligonucleotide
tccgatccattcttctacca

SEQ ID NO: 2418 - DNA, 20 bp, Artificial sequence
  Synthetic oligonucleotide
agacccctcactttttccca

SEQ ID NO: 2419 - DNA, 20 bp, Artificial sequence
  Synthetic oligonucleotide
gtcctagtttctccacctat

SEQ ID NO: 2420 - DNA, 20 bp, Artificial sequence
  Synthetic oligonucleotide
ccaaccttcttctgtgcatt

SEQ ID NO: 2421 - DNA, 20 bp, Artificial sequence
  Synthetic oligonucleotide
tcctcacacagctttaacat

SEQ ID NO: 2422 - DNA, 20 bp, Artificial sequence
  Synthetic oligonucleotide
gcttgtttgacatcttggtc

SEQ ID NO: 2423 - DNA, 20 bp, Artificial sequence
  Synthetic oligonucleotide
gtgtgcctcagacctcatat

SEQ ID NO: 2424 - DNA, 20 bp, Artificial sequence
  Synthetic oligonucleotide
acatttgttcctcacctgca

SEQ ID NO: 2425 - DNA, 20 bp, Artificial sequence
  Synthetic oligonucleotide
tgtttccagccactacttcc

SEQ ID NO: 2426 - DNA, 20 bp, Artificial sequence
  Synthetic oligonucleotide
cctaagtttcagaatcggta

SEQ ID NO: 2427 - DNA, 20 bp, Artificial sequence
  Synthetic oligonucleotide
tgccacacatctctgccacc

SEQ ID NO: 2428 - DNA, 20 bp, Artificial sequence
  Synthetic oligonucleotide
gcctcctccctcatatgaac

SEQ ID NO: 2429 - DNA, 20 bp, Artificial sequence
  Synthetic oligonucleotide
accagtcaatgaatgctgct

SEQ ID NO: 2430 - DNA, 20 bp, Artificial sequence
  Synthetic oligonucleotide
aatcggtattatattccagt

SEQ ID NO: 2431 - DNA, 20 bp, Artificial sequence
  Synthetic oligonucleotide
gattacatactacagcttct

SEQ ID NO: 2432 - DNA, 20 bp, Artificial sequence
  Synthetic oligonucleotide
gtccacacatatgtctgcca

SEQ ID NO: 2433 - DNA, 20 bp, Artificial sequence
  Synthetic oligonucleotide
tcccaaactatagaatcatc

SEQ ID NO: 2434 - DNA, 20 bp, Artificial sequence
  Synthetic oligonucleotide
ttcttgcactgcataccggc

SEQ ID NO: 2435 - DNA, 20 bp, Artificial sequence
  Synthetic oligonucleotide
gctgtgttagcagctggccc

SEQ ID NO: 2436 - DNA, 20 bp, Artificial sequence
  Synthetic oligonucleotide
gttgaagtatccacacccta

SEQ ID NO: 2437 - DNA, 20 bp, Artificial sequence
  Synthetic oligonucleotide
ctcccactagtgcccagcca

SEQ ID NO: 2438 - DNA, 20 bp, Artificial sequence
  Synthetic oligonucleotide
gttctaggtcagaatctcca

SEQ ID NO: 2439 - DNA, 20 bp, Artificial sequence
  Synthetic oligonucleotide
tgggcttcaaataacagact

SEQ ID NO: 2440 - DNA, 20 bp, Artificial sequence
  Synthetic oligonucleotide
agacagtttctctccttcgc

SEQ ID NO: 2441 - DNA, 20 bp, Artificial sequence
  Synthetic oligonucleotide
gttcctcacctgcaaagtac

SEQ ID NO: 2442 - DNA, 20 bp, Artificial sequence
  Synthetic oligonucleotide
tggtactatgcctccgcata

SEQ ID NO: 2443 - DNA, 20 bp, Artificial sequence
  Synthetic oligonucleotide
gtaccacaggacattcttcc

SEQ ID NO: 2444 - DNA, 20 bp, Artificial sequence
  Synthetic oligonucleotide
gccagacatatatcataacc

SEQ ID NO: 2445 - DNA, 20 bp, Artificial sequence
  Synthetic oligonucleotide
cagactacttgctattcctt

SEQ ID NO: 2446 - DNA, 20 bp, Artificial sequence
  Synthetic oligonucleotide
gagcactatgtttcatgcac

SEQ ID NO: 2447 - DNA, 20 bp, Artificial sequence
  Synthetic oligonucleotide
gacccctcactttttcccac

SEQ ID NO: 2448 - DNA, 20 bp, Artificial sequence
  Synthetic oligonucleotide
tccagtgacctaacttcagt

SEQ ID NO: 2449 - DNA, 20 bp, Artificial sequence
  Synthetic oligonucleotide
gcctctccagaacccaggaa

SEQ ID NO: 2450 - DNA, 20 bp, Artificial sequence
  Synthetic oligonucleotide
gtacctgctacatcatgaca

SEQ ID NO: 2451 - DNA, 20 bp, Artificial sequence
  Synthetic oligonucleotide
catgtatatctatataaaca

SEQ ID NO: 2452 - DNA, 20 bp, Artificial sequence
  Synthetic oligonucleotide
tgaaggctcatcacttctca

SEQ ID NO: 2453 - DNA, 20 bp, Artificial sequence
  Synthetic oligonucleotide
gctcaactgtctatatgcaa

SEQ ID NO: 2454 - DNA, 20 bp, Artificial sequence
  Synthetic oligonucleotide
ctattggcattctctaagct

SEQ ID NO: 2455 - DNA, 20 bp, Artificial sequence
  Synthetic oligonucleotide
cctggctttaatatctccat

SEQ ID NO: 2456 - DNA, 20 bp, Artificial sequence
  Synthetic oligonucleotide
gatccattcttctaccaccc

SEQ ID NO: 2457 - DNA, 20 bp, Artificial sequence
  Synthetic oligonucleotide
gcctcagacctcatatcatt

SEQ ID NO: 2458 - DNA, 20 bp, Artificial sequence
  Synthetic oligonucleotide
tggaacttttgctctttcct

SEQ ID NO: 2459 - DNA, 20 bp, Artificial sequence
  Synthetic oligonucleotide
gtctccataatagtcttaca

SEQ ID NO: 2460 - DNA, 20 bp, Artificial sequence
  Synthetic oligonucleotide
ggctggctcttccattctca

SEQ ID NO: 2461 - DNA, 20 bp, Artificial sequence
  Synthetic oligonucleotide
taggatttgcttcaaagcca

SEQ ID NO: 2462 - DNA, 20 bp, Artificial sequence
  Synthetic oligonucleotide
tccctcatatgaacagggta

SEQ ID NO: 2463 - DNA, 20 bp, Artificial sequence
  Synthetic oligonucleotide
tccagtcaactcgatgttcc

SEQ ID NO: 2464 - DNA, 20 bp, Artificial sequence
  Synthetic oligonucleotide
cccctctgtctacttacttc

SEQ ID NO: 2465 - DNA, 20 bp, Artificial sequence
  Synthetic oligonucleotide
ggttgcaccctgatatgcca

SEQ ID NO: 2466 - DNA, 20 bp, Artificial sequence
  Synthetic oligonucleotide
tgacagccactgcttctgta

SEQ ID NO: 2467 - DNA, 20 bp, Artificial sequence
  Synthetic oligonucleotide
cgtgcttgtgtcattccctc

SEQ ID NO: 2468 - DNA, 20 bp, Artificial sequence
  Synthetic oligonucleotide
gccaacttgaacctgctccc

SEQ ID NO: 2469 - DNA, 20 bp, Artificial sequence
  Synthetic oligonucleotide
ataaaaagaaaaacagacca

SEQ ID NO: 2470 - DNA, 20 bp, Artificial sequence
  Synthetic oligonucleotide
gccactcatgaacaccacat

SEQ ID NO: 2471 - DNA, 20 bp, Artificial sequence
  Synthetic oligonucleotide
attttagcatttcttaggta

SEQ ID NO: 2472 - DNA, 20 bp, Artificial sequence
  Synthetic oligonucleotide
gccagtggtctccttaagct

SEQ ID NO: 2473 - DNA, 20 bp, Artificial sequence
  Synthetic oligonucleotide
gctttatctgttctactaca

SEQ ID NO: 2474 - DNA, 20 bp, Artificial sequence
  Synthetic oligonucleotide
taccagaattgatttgttct

SEQ ID NO: 2475 - DNA, 20 bp, Artificial sequence
  Synthetic oligonucleotide
ccccttcaataccttggcct

SEQ ID NO: 2476 - DNA, 20 bp, Artificial sequence
  Synthetic oligonucleotide
tgctgtttttacctttaggt

SEQ ID NO: 2477 - DNA, 20 bp, Artificial sequence
  Synthetic oligonucleotide
tggactttgctatttcctcc

SEQ ID NO: 2478 - DNA, 20 bp, Artificial sequence
  Synthetic oligonucleotide
ggtcaatgcagataacaatc

SEQ ID NO: 2479 - DNA, 20 bp, Artificial sequence
  Synthetic oligonucleotide
actctgttacagtcccagct

SEQ ID NO: 2480 - DNA, 20 bp, Artificial sequence
  Synthetic oligonucleotide
gctacttactgatcctttca

SEQ ID NO: 2481 - DNA, 20 bp, Artificial sequence
  Synthetic oligonucleotide
gctgaagaacactgtcagct

SEQ ID NO: 2482 - DNA, 20 bp, Artificial sequence
  Synthetic oligonucleotide
atgtttatctctctatataa

SEQ ID NO: 2483 - DNA, 20 bp, Artificial sequence
  Synthetic oligonucleotide
aacatgtttccttaacttca

SEQ ID NO: 2484 - DNA, 20 bp, Artificial sequence
  Synthetic oligonucleotide
gctgaagtaaaggacagccc

SEQ ID NO: 2485 - DNA, 20 bp, Artificial sequence
  Synthetic oligonucleotide
catataacacattttaggta

SEQ ID NO: 2486 - DNA, 20 bp, Artificial sequence
  Synthetic oligonucleotide
tagacattggtttaccagca

SEQ ID NO: 2487 - DNA, 20 bp, Artificial sequence
  Synthetic oligonucleotide
ttgtcataaattccatttta

SEQ ID NO: 2488 - DNA, 20 bp, Artificial sequence
  Synthetic oligonucleotide
ttccaattgtcactaagcac

SEQ ID NO: 2489 - DNA, 20 bp, Artificial sequence
  Synthetic oligonucleotide
tggcaacagactgctaggta

SEQ ID NO: 2490 - DNA, 20 bp, Artificial sequence
  Synthetic oligonucleotide
tgatcctgcttttttctcac

SEQ ID NO: 2491 - DNA, 20 bp, Artificial sequence
  Synthetic oligonucleotide
tttccagccactacttccct

SEQ ID NO: 2492 - DNA, 20 bp, Artificial sequence
  Synthetic oligonucleotide
ccagaatcccatgcctggca

SEQ ID NO: 2493 - DNA, 20 bp, Artificial sequence
  Synthetic oligonucleotide
gagtcacccctacatgcctc

SEQ ID NO: 2494 - DNA, 20 bp, Artificial sequence
  Synthetic oligonucleotide
cagaacactttcttggtctc

SEQ ID NO: 2495 - DNA, 20 bp, Artificial sequence
  Synthetic oligonucleotide
atgttgttctgatagaagct

SEQ ID NO: 2496 - DNA, 20 bp, Artificial sequence
  Synthetic oligonucleotide
atgccatgcgatacctagca

SEQ ID NO: 2497 - DNA, 20 bp, Artificial sequence
  Synthetic oligonucleotide
tgctccaccatcaagtagct

SEQ ID NO: 2498 - DNA, 20 bp, Artificial sequence
  Synthetic oligonucleotide
tagcctgcacatatccctca

SEQ ID NO: 2499 - DNA, 20 bp, Artificial sequence
  Synthetic oligonucleotide
aatccctccaagtcaagggc

SEQ ID NO: 2500 - DNA, 20 bp, Artificial sequence
  Synthetic oligonucleotide
tacttctgataatttgtcac

SEQ ID NO: 2501 - DNA, 20 bp, Artificial sequence
  Synthetic oligonucleotide
gggcatccaagaatcctctc

SEQ ID NO: 2502 - DNA, 20 bp, Artificial sequence
  Synthetic oligonucleotide
agaactgtaacactgcaatc

SEQ ID NO: 2503 - DNA, 20 bp, Artificial sequence
  Synthetic oligonucleotide
gtatttcaccgtttagagca

SEQ ID NO: 2504 - DNA, 20 bp, Artificial sequence
  Synthetic oligonucleotide
tctcctggttttcaaggcat

SEQ ID NO: 2505 - DNA, 20 bp, Artificial sequence
  Synthetic oligonucleotide
gtctggtctttttttgctcc

SEQ ID NO: 2506 - DNA, 20 bp, Artificial sequence
  Synthetic oligonucleotide
ctgtttttacctttaggtat

SEQ ID NO: 2507 - DNA, 20 bp, Artificial sequence
  Synthetic oligonucleotide
aaattccattttacttgata

SEQ ID NO: 2508 - DNA, 20 bp, Artificial sequence
  Synthetic oligonucleotide
gctggtctcactttccccaa

SEQ ID NO: 2509 - DNA, 20 bp, Artificial sequence
  Synthetic oligonucleotide
ctgcacatctacttagtact

SEQ ID NO: 2510 - DNA, 20 bp, Artificial sequence
  Synthetic oligonucleotide
agccactacttccctcttga

SEQ ID NO: 2511 - DNA, 20 bp, Artificial sequence
  Synthetic oligonucleotide
ccctctgtctacttacttct

SEQ ID NO: 2512 - DNA, 20 bp, Artificial sequence
  Synthetic oligonucleotide
ccacaggacattcttccaca

SEQ ID NO: 2513 - DNA, 20 bp, Artificial sequence
  Synthetic oligonucleotide
cagacatatatcataaccac

SEQ ID NO: 2514 - DNA, 20 bp, Artificial sequence
  Synthetic oligonucleotide
tgtttatctctctatataaa

SEQ ID NO: 2515 - DNA, 20 bp, Artificial sequence
  Synthetic oligonucleotide
tagcattcaccacagcatgt

SEQ ID NO: 2516 - DNA, 20 bp, Artificial sequence
  Synthetic oligonucleotide
ttttagcatttcttaggtac

SEQ ID NO: 2517 - DNA, 20 bp, Artificial sequence
  Synthetic oligonucleotide
aaggctcatcacttctcact

SEQ ID NO: 2518 - DNA, 20 bp, Artificial sequence
  Synthetic oligonucleotide
acccctcactttttcccacc

SEQ ID NO: 2519 - DNA, 20 bp, Artificial sequence
  Synthetic oligonucleotide
ccaacttgaacctgctccct

SEQ ID NO: 2520 - DNA, 20 bp, Artificial sequence
  Synthetic oligonucleotide
gttacagtcccagctcgcta

SEQ ID NO: 2521 - DNA, 20 bp, Artificial sequence
  Synthetic oligonucleotide
gcagacatttgctagccccc

SEQ ID NO: 2522 - DNA, 20 bp, Artificial sequence
  Synthetic oligonucleotide
atagaatcatcacaagcatt

SEQ ID NO: 2523 - DNA, 20 bp, Artificial sequence
  Synthetic oligonucleotide
aagcaattttatcactatgc

SEQ ID NO: 2524 - DNA, 20 bp, Artificial sequence
  Synthetic oligonucleotide
gccatgcgatacctagcact

SEQ ID NO: 2525 - DNA, 20 bp, Artificial sequence
  Synthetic oligonucleotide
atgtatatctatataaacat

SEQ ID NO: 2526 - DNA, 20 bp, Artificial sequence
  Synthetic oligonucleotide
tcaagcatagtttttcagtc

SEQ ID NO: 2527 - DNA, 20 bp, Artificial sequence
  Synthetic oligonucleotide
gtggcaggctgcactcccta

SEQ ID NO: 2528 - DNA, 20 bp, Artificial sequence
  Synthetic oligonucleotide
gacagtttctctccttcgcc

SEQ ID NO: 2529 - DNA, 20 bp, Artificial sequence
  Synthetic oligonucleotide
atgtttccttaacttcagtc

SEQ ID NO: 2530 - DNA, 20 bp, Artificial sequence
  Synthetic oligonucleotide
gtctatatgcaacaccacct

SEQ ID NO: 2531 - DNA, 20 bp, Artificial sequence
  Synthetic oligonucleotide
tctcaactccctggtcatgc

SEQ ID NO: 2532 - DNA, 20 bp, Artificial sequence
  Synthetic oligonucleotide
gactacttgctattccttaa

SEQ ID NO: 2533 - DNA, 20 bp, Artificial sequence
  Synthetic oligonucleotide
ccattaccaactcaaagcct

SEQ ID NO: 2534 - DNA, 20 bp, Artificial sequence
  Synthetic oligonucleotide
tctgtgaatcatgtcagctt

SEQ ID NO: 2535 - DNA, 20 bp, Artificial sequence
  Synthetic oligonucleotide
ctgcagtgcagatatctcct

SEQ ID NO: 2536 - DNA, 20 bp, Artificial sequence
  Synthetic oligonucleotide
ggactttgctatttcctcca

SEQ ID NO: 2537 - DNA, 20 bp, Artificial sequence
  Synthetic oligonucleotide
gctggctcttccattctcag

SEQ ID NO: 2538 - DNA, 20 bp, Artificial sequence
  Synthetic oligonucleotide
gtcccctctctatgtcgggc

SEQ ID NO: 2539 - DNA, 20 bp, Artificial sequence
  Synthetic oligonucleotide
tttgtccctaacattttcct

SEQ ID NO: 2540 - DNA, 20 bp, Artificial sequence
  Synthetic oligonucleotide
gtagccatcactgctttcca

SEQ ID NO: 2541 - DNA, 20 bp, Artificial sequence
  Synthetic oligonucleotide
ctgtaacactgcaatcacga

SEQ ID NO: 2542 - DNA, 20 bp, Artificial sequence
  Synthetic oligonucleotide
gcttgtgtcattccctctct

SEQ ID NO: 2543 - DNA, 20 bp, Artificial sequence
  Synthetic oligonucleotide
gcctgcacatatccctcact

SEQ ID NO: 2544 - DNA, 20 bp, Artificial sequence
  Synthetic oligonucleotide
gttggtgctattaaatgtaa

SEQ ID NO: 2545 - DNA, 20 bp, Artificial sequence
  Synthetic oligonucleotide
atggtcatctttgctccata

SEQ ID NO: 2546 - DNA, 20 bp, Artificial sequence
  Synthetic oligonucleotide
gatcctgcttttttctcact

SEQ ID NO: 2547 - DNA, 20 bp, Artificial sequence
  Synthetic oligonucleotide
tcttgcactgcataccggcc

SEQ ID NO: 2548 - DNA, 20 bp, Artificial sequence
  Synthetic oligonucleotide
atataacacattttaggtat

SEQ ID NO: 2549 - DNA, 20 bp, Artificial sequence
  Synthetic oligonucleotide
tcagttggtatctcctccct

SEQ ID NO: 2550 - DNA, 20 bp, Artificial sequence
  Synthetic oligonucleotide
gttgcaccctgatatgccat

SEQ ID NO: 2551 - DNA, 20 bp, Artificial sequence
  Synthetic oligonucleotide
taaaaagaaaaacagaccat

SEQ ID NO: 2552 - DNA, 20 bp, Artificial sequence
  Synthetic oligonucleotide
atccctccaagtcaagggct

SEQ ID NO: 2553 - DNA, 20 bp, Artificial sequence
  Synthetic oligonucleotide
tccaattgtcactaagcact

SEQ ID NO: 2554 - DNA, 20 bp, Artificial sequence
  Synthetic oligonucleotide
gtgacctaacttcagtatca

SEQ ID NO: 2555 - DNA, 20 bp, Artificial sequence
  Synthetic oligonucleotide
gctccacaatgtttttagac

SEQ ID NO: 2556 - DNA, 20 bp, Artificial sequence
  Synthetic oligonucleotide
cctagttatcatcaatatca

SEQ ID NO: 2557 - DNA, 20 bp, Artificial sequence
  Synthetic oligonucleotide
gcttcaaataacagactcaa

SEQ ID NO: 2558 - DNA, 20 bp, Artificial sequence
  Synthetic oligonucleotide
ctccaccatgttcacttggt

SEQ ID NO: 2559 - DNA, 20 bp, Artificial sequence
  Synthetic oligonucleotide
gcttcggattctgaaagcat

SEQ ID NO: 2560 - DNA, 20 bp, Artificial sequence
  Synthetic oligonucleotide
taataaaatatatactaagt

SEQ ID NO: 2561 - DNA, 20 bp, Artificial sequence
  Synthetic oligonucleotide
cagtggtctccttaagctca

SEQ ID NO: 2562 - DNA, 20 bp, Artificial sequence
  Synthetic oligonucleotide
ccattgtgtctatcttcaac

SEQ ID NO: 2563 - DNA, 20 bp, Artificial sequence
  Synthetic oligonucleotide
gtaccagtttgatcactatc

SEQ ID NO: 2564 - DNA, 20 bp, Artificial sequence
  Synthetic oligonucleotide
gctaaggccttgaacttttc

SEQ ID NO: 2565 - DNA, 20 bp, Artificial sequence
  Synthetic oligonucleotide
acatcctattgagacatgct

SEQ ID NO: 2566 - DNA, 20 bp, Artificial sequence
  Synthetic oligonucleotide
attctgtgctctcactgtat

SEQ ID NO: 2567 - DNA, 20 bp, Artificial sequence
  Synthetic oligonucleotide
gccagagcactcctactccc

SEQ ID NO: 2568 - DNA, 20 bp, Artificial sequence
  Synthetic oligonucleotide
caccactttcttagaagact

SEQ ID NO: 2569 - DNA, 20 bp, Artificial sequence
  Synthetic oligonucleotide
cttcaatagtttaccatggc

SEQ ID NO: 2570 - DNA, 20 bp, Artificial sequence
  Synthetic oligonucleotide
gttcatgacactattctgta

SEQ ID NO: 2571 - DNA, 20 bp, Artificial sequence
  Synthetic oligonucleotide
gcagctggcccttttatctc

SEQ ID NO: 2572 - DNA, 20 bp, Artificial sequence
  Synthetic oligonucleotide
gctgttttcatttttccgag

SEQ ID NO: 2573 - DNA, 20 bp, Artificial sequence
  Synthetic oligonucleotide
atagtcttacaacagaggta

SEQ ID NO: 2574 - DNA, 20 bp, Artificial sequence
  Synthetic oligonucleotide
ctcgatgttcccaattccct

SEQ ID NO: 2575 - DNA, 20 bp, Artificial sequence
  Synthetic oligonucleotide
actagtgcccagccagcatc

SEQ ID NO: 2576 - DNA, 20 bp, Artificial sequence
  Synthetic oligonucleotide
ttgaagtatccacaccctat

SEQ ID NO: 2577 - DNA, 20 bp, Artificial sequence
  Synthetic oligonucleotide
ctgctacatcatgacaacca

SEQ ID NO: 2578 - DNA, 20 bp, Artificial sequence
  Synthetic oligonucleotide
tattggcattctctaagctc

SEQ ID NO: 2579 - DNA, 20 bp, Artificial sequence
  Synthetic oligonucleotide
tgcctccgcataaagaatca

SEQ ID NO: 2580 - DNA, 20 bp, Artificial sequence
  Synthetic oligonucleotide
gcatccaagaatcctctcca

SEQ ID NO: 2581 - DNA, 20 bp, Artificial sequence
  Synthetic oligonucleotide
ataggatatcttttcagatc

SEQ ID NO: 2582 - DNA, 20 bp, Artificial sequence
  Synthetic oligonucleotide
atggacttgtcacttatcct

SEQ ID NO: 2583 - DNA, 20 bp, Artificial sequence
  Synthetic oligonucleotide
aggttccttgccatccactc

SEQ ID NO: 2584 - DNA, 20 bp, Artificial sequence
  Synthetic oligonucleotide
gctctgcaaataaggttctc

SEQ ID NO: 2585 - DNA, 20 bp, Artificial sequence
  Synthetic oligonucleotide
aataaaatatatactaagtt

SEQ ID NO: 2586 - DNA, 20 bp, Artificial sequence
  Synthetic oligonucleotide
agacatatatcataaccaca

SEQ ID NO: 2587 - DNA, 20 bp, Artificial sequence
  Synthetic oligonucleotide
ataccaggttcttacagcct

SEQ ID NO: 2588 - DNA, 20 bp, Artificial sequence
  Synthetic oligonucleotide
aggaaaggtatcatgctcct

SEQ ID NO: 2589 - DNA, 20 bp, Artificial sequence
  Synthetic oligonucleotide
gcatagtttttcagtctccc

SEQ ID NO: 2590 - DNA, 20 bp, Artificial sequence
  Synthetic oligonucleotide
cacaggacattcttccacat

SEQ ID NO: 2591 - DNA, 20 bp, Artificial sequence
  Synthetic oligonucleotide
tgcttcaatcaatttacagt

SEQ ID NO: 2592 - DNA, 20 bp, Artificial sequence
  Synthetic oligonucleotide
gggaacattcctcaatgctt

SEQ ID NO: 2593 - DNA, 20 bp, Artificial sequence
  Synthetic oligonucleotide
tccctccaagtcaagggctc

SEQ ID NO: 2594 - DNA, 20 bp, Artificial sequence
  Synthetic oligonucleotide
agcaattttatcactatgct

SEQ ID NO: 2595 - DNA, 20 bp, Artificial sequence
  Synthetic oligonucleotide
gcaccctgatatgccatgat

SEQ ID NO: 2596 - DNA, 20 bp, Artificial sequence
  Synthetic oligonucleotide
ctgttttcatttttccgagt

SEQ ID NO: 2597 - DNA, 20 bp, Artificial sequence
  Synthetic oligonucleotide
ttcaatagtttaccatggct

SEQ ID NO: 2598 - DNA, 20 bp, Artificial sequence
  Synthetic oligonucleotide
gcacttaaatttccccagca

SEQ ID NO: 2599 - DNA, 20 bp, Artificial sequence
  Synthetic oligonucleotide
atgagatcaaatcttattac

SEQ ID NO: 2600 - DNA, 20 bp, Artificial sequence
  Synthetic oligonucleotide
tctccttaagctcaaacacc

SEQ ID NO: 2601 - DNA, 20 bp, Artificial sequence
  Synthetic oligonucleotide
gcagaattgtaactcttgca

SEQ ID NO: 2602 - DNA, 20 bp, Artificial sequence
  Synthetic oligonucleotide
gccaatgcaaggcctgcctc

SEQ ID NO: 2603 - DNA, 20 bp, Artificial sequence
  Synthetic oligonucleotide
gccactacttccctcttgaa

SEQ ID NO: 2604 - DNA, 20 bp, Artificial sequence
  Synthetic oligonucleotide
tataacacattttaggtatc

SEQ ID NO: 2605 - DNA, 20 bp, Artificial sequence
  Synthetic oligonucleotide
tttatctctctatataaaca

SEQ ID NO: 2606 - DNA, 20 bp, Artificial sequence
  Synthetic oligonucleotide
gcctccgcataaagaatcat

SEQ ID NO: 2607 - DNA, 20 bp, Artificial sequence
  Synthetic oligonucleotide
ccccagttatggctataaca

SEQ ID NO: 2608 - DNA, 20 bp, Artificial sequence
  Synthetic oligonucleotide
tgggactgcacacatttatc

SEQ ID NO: 2609 - DNA, 20 bp, Artificial sequence
  Synthetic oligonucleotide
gccaagcactctcctactta

SEQ ID NO: 2610 - DNA, 20 bp, Artificial sequence
  Synthetic oligonucleotide
gctggcccttttatctctaa

SEQ ID NO: 2611 - DNA, 20 bp, Artificial sequence
  Synthetic oligonucleotide
attttctatctgaccaaaca

SEQ ID NO: 2612 - DNA, 20 bp, Artificial sequence
  Synthetic oligonucleotide
tagccatcactgctttccat

SEQ ID NO: 2613 - DNA, 20 bp, Artificial sequence
  Synthetic oligonucleotide
ccaccatgttcacttggtgc

SEQ ID NO: 2614 - DNA, 20 bp, Artificial sequence
  Synthetic oligonucleotide
tttagcatttcttaggtaca

SEQ ID NO: 2615 - DNA, 20 bp, Artificial sequence
  Synthetic oligonucleotide
gccatcactctagtcctggc

SEQ ID NO: 2616 - DNA, 20 bp, Artificial sequence
  Synthetic oligonucleotide
gccaaaatgtttaacagtca

SEQ ID NO: 2617 - DNA, 20 bp, Artificial sequence
  Synthetic oligonucleotide
tgctatttcctccaaacatc

SEQ ID NO: 2618 - DNA, 20 bp, Artificial sequence
  Synthetic oligonucleotide
gcacatatccctcactaatc

SEQ ID NO: 2619 - DNA, 20 bp, Artificial sequence
  Synthetic oligonucleotide
cttgcactgcataccggcca

SEQ ID NO: 2620 - DNA, 20 bp, Artificial sequence
  Synthetic oligonucleotide
gggaaatcttactagctcaa

SEQ ID NO: 2621 - DNA, 20 bp, Artificial sequence
  Synthetic oligonucleotide
tgtttttacctttaggtata

SEQ ID NO: 2622 - DNA, 20 bp, Artificial sequence
  Synthetic oligonucleotide
tccctaacattttccttatt

SEQ ID NO: 2623 - DNA, 20 bp, Artificial sequence
  Synthetic oligonucleotide
agaattggcacttacactta

SEQ ID NO: 2624 - DNA, 20 bp, Artificial sequence
  Synthetic oligonucleotide
gtggactctgtaatccatcc

SEQ ID NO: 2625 - DNA, 20 bp, Artificial sequence
  Synthetic oligonucleotide
gctccagctgccaacacctt

SEQ ID NO: 2626 - DNA, 20 bp, Artificial sequence
  Synthetic oligonucleotide
cattgtgtctatcttcaacc

SEQ ID NO: 2627 - DNA, 20 bp, Artificial sequence
  Synthetic oligonucleotide
aactacttttcagttgtgct

SEQ ID NO: 2628 - DNA, 20 bp, Artificial sequence
  Synthetic oligonucleotide
ctgcaatcacgaaattggta

SEQ ID NO: 2629 - DNA, 20 bp, Artificial sequence
  Synthetic oligonucleotide
acagtttctctccttcgcct

SEQ ID NO: 2630 - DNA, 20 bp, Artificial sequence
  Synthetic oligonucleotide
atccacaccctataattcag

SEQ ID NO: 2631 - DNA, 20 bp, Artificial sequence
  Synthetic oligonucleotide
ctcactttttcccaccaagt

SEQ ID NO: 2632 - DNA, 20 bp, Artificial sequence
  Synthetic oligonucleotide
aaagaaaaacagaccataac

SEQ ID NO: 2633 - DNA, 20 bp, Artificial sequence
  Synthetic oligonucleotide
aggctcatcacttctcactt

SEQ ID NO: 2634 - DNA, 20 bp, Artificial sequence
  Synthetic oligonucleotide
gctacatcatgacaaccact

SEQ ID NO: 2635 - DNA, 20 bp, Artificial sequence
  Synthetic oligonucleotide
tgcgatacctagcactcctc

SEQ ID NO: 2636 - DNA, 20 bp, Artificial sequence
  Synthetic oligonucleotide
cagcagctaatacaggttcc

SEQ ID NO: 2637 - DNA, 20 bp, Artificial sequence
  Synthetic oligonucleotide
cctcttttggactccttgct

SEQ ID NO: 2638 - DNA, 20 bp, Artificial sequence
  Synthetic oligonucleotide
acctaacttcagtatcaaca

SEQ ID NO: 2639 - DNA, 20 bp, Artificial sequence
  Synthetic oligonucleotide
agttggtcattctatgtata

SEQ ID NO: 2640 - DNA, 20 bp, Artificial sequence
  Synthetic oligonucleotide
ttggcattctctaagctcct

SEQ ID NO: 2641 - DNA, 20 bp, Artificial sequence
  Synthetic oligonucleotide
tgcacatctacttagtacta

SEQ ID NO: 2642 - DNA, 20 bp, Artificial sequence
  Synthetic oligonucleotide
taggatatcttttcagatcc

SEQ ID NO: 2643 - DNA, 20 bp, Artificial sequence
  Synthetic oligonucleotide
gctcgctactactctgagct

SEQ ID NO: 2644 - DNA, 20 bp, Artificial sequence
  Synthetic oligonucleotide
tgtatatctatataaacata

SEQ ID NO: 2645 - DNA, 20 bp, Artificial sequence
  Synthetic oligonucleotide
tcgatgttcccaattccctt

SEQ ID NO: 2646 - DNA, 20 bp, Artificial sequence
  Synthetic oligonucleotide
gcattattttgctaaatccc

SEQ ID NO: 2647 - DNA, 20 bp, Artificial sequence
  Synthetic oligonucleotide
tcaaagccttctattctgca

SEQ ID NO: 2648 - DNA, 20 bp, Artificial sequence
  Synthetic oligonucleotide
ccccaactcttgtaatacac

SEQ ID NO: 2649 - DNA, 20 bp, Artificial sequence
  Synthetic oligonucleotide
gccagcatcctcaatgaaac

SEQ ID NO: 2650 - DNA, 20 bp, Artificial sequence
  Synthetic oligonucleotide
aagcatcccctgttctacca

SEQ ID NO: 2651 - DNA, 20 bp, Artificial sequence
  Synthetic oligonucleotide
ctggtctcactttccccaac

SEQ ID NO: 2652 - DNA, 20 bp, Artificial sequence
  Synthetic oligonucleotide
accagtttgatcactatctt

SEQ ID NO: 2653 - DNA, 20 bp, Artificial sequence
  Synthetic oligonucleotide
tggtcatctttgctccataa

SEQ ID NO: 2654 - DNA, 20 bp, Artificial sequence
  Synthetic oligonucleotide
atgccagctacattatggca

SEQ ID NO: 2655 - DNA, 20 bp, Artificial sequence
  Synthetic oligonucleotide
gtgcaatatgttataactac

SEQ ID NO: 2656 - DNA, 20 bp, Artificial sequence
  Synthetic oligonucleotide
gcaaatctcagaatctgcct

SEQ ID NO: 2657 - DNA, 20 bp, Artificial sequence
  Synthetic oligonucleotide
tcatcacaagcattcatgac

SEQ ID NO: 2658 - DNA, 20 bp, Artificial sequence
  Synthetic oligonucleotide
cttgaacctgctccctaaca

SEQ ID NO: 2659 - DNA, 20 bp, Artificial sequence
  Synthetic oligonucleotide
gcttgagaactctaggccct

SEQ ID NO: 2660 - DNA, 20 bp, Artificial sequence
  Synthetic oligonucleotide
aaggtatcatgctcctggcc

SEQ ID NO: 2661 - DNA, 20 bp, Artificial sequence
  Synthetic oligonucleotide
tctgaagtactcgctgtgct

SEQ ID NO: 2662 - DNA, 20 bp, Artificial sequence
  Synthetic oligonucleotide
tgcaatcacgaaattggtac

SEQ ID NO: 2663 - DNA, 20 bp, Artificial sequence
  Synthetic oligonucleotide
aggcacaaaggaaactcctc

SEQ ID NO: 2664 - DNA, 20 bp, Artificial sequence
  Synthetic oligonucleotide
agccagacttgatttctgct

SEQ ID NO: 2665 - DNA, 20 bp, Artificial sequence
  Synthetic oligonucleotide
tgggcagtatctgatcagtt

SEQ ID NO: 2666 - DNA, 20 bp, Artificial sequence
  Synthetic oligonucleotide
ccttgtcttaagtaacatct

SEQ ID NO: 2667 - DNA, 20 bp, Artificial sequence
  Synthetic oligonucleotide
aagctcaaacaccatgccgt

SEQ ID NO: 2668 - DNA, 20 bp, Artificial sequence
  Synthetic oligonucleotide
gtccagttagtataaagcac

SEQ ID NO: 2669 - DNA, 20 bp, Artificial sequence
  Synthetic oligonucleotide
catcacaagcattcatgact

SEQ ID NO: 2670 - DNA, 20 bp, Artificial sequence
  Synthetic oligonucleotide
ggaacattcctcaatgcttc

SEQ ID NO: 2671 - DNA, 20 bp, Artificial sequence
  Synthetic oligonucleotide
tccagctgccaacaccttgt

SEQ ID NO: 2672 - DNA, 20 bp, Artificial sequence
  Synthetic oligonucleotide
ctcatcctgtgaccacactt

SEQ ID NO: 2673 - DNA, 20 bp, Artificial sequence
  Synthetic oligonucleotide
gtatatctatataaacatat

SEQ ID NO: 2674 - DNA, 20 bp, Artificial sequence
  Synthetic oligonucleotide
ggactctgtaatccatccac

SEQ ID NO: 2675 - DNA, 20 bp, Artificial sequence
  Synthetic oligonucleotide
gggactgcacacatttatca

SEQ ID NO: 2676 - DNA, 20 bp, Artificial sequence
  Synthetic oligonucleotide
aggttctctgaaatcagcca

SEQ ID NO: 2677 - DNA, 20 bp, Artificial sequence
  Synthetic oligonucleotide
gatgggtccttcccagtgca

SEQ ID NO: 2678 - DNA, 20 bp, Artificial sequence
  Synthetic oligonucleotide
tacttccctcttgaatagca

SEQ ID NO: 2679 - DNA, 20 bp, Artificial sequence
  Synthetic oligonucleotide
ctgggttacagaattcaact

SEQ ID NO: 2680 - DNA, 20 bp, Artificial sequence
  Synthetic oligonucleotide
ataaaatatatactaagtta

SEQ ID NO: 2681 - DNA, 20 bp, Artificial sequence
  Synthetic oligonucleotide
ccatcactctagtcctggct

SEQ ID NO: 2682 - DNA, 20 bp, Artificial sequence
  Synthetic oligonucleotide
tccctattataatgttgcac

SEQ ID NO: 2683 - DNA, 20 bp, Artificial sequence
  Synthetic oligonucleotide
gacatatatcataaccacat

SEQ ID NO: 2684 - DNA, 20 bp, Artificial sequence
  Synthetic oligonucleotide
tccgcataaagaatcatgtt

SEQ ID NO: 2685 - DNA, 20 bp, Artificial sequence
  Synthetic oligonucleotide
cagtttctctccttcgccta

SEQ ID NO: 2686 - DNA, 20 bp, Artificial sequence
  Synthetic oligonucleotide
tccacaccctataattcagc

SEQ ID NO: 2687 - DNA, 20 bp, Artificial sequence
  Synthetic oligonucleotide
tggcattctctaagctcctt

SEQ ID NO: 2688 - DNA, 20 bp, Artificial sequence
  Synthetic oligonucleotide
gtacctttatttctacatca

SEQ ID NO: 2689 - DNA, 20 bp, Artificial sequence
  Synthetic oligonucleotide
gtatcattatatgctggtct

SEQ ID NO: 2690 - DNA, 20 bp, Artificial sequence
  Synthetic oligonucleotide
attggcacttacacttactt

SEQ ID NO: 2691 - DNA, 20 bp, Artificial sequence
  Synthetic oligonucleotide
tgtgtctatcttcaacctta

SEQ ID NO: 2692 - DNA, 20 bp, Artificial sequence
  Synthetic oligonucleotide
gctgggcttatgctggatgc

SEQ ID NO: 2693 - DNA, 20 bp, Artificial sequence
  Synthetic oligonucleotide
atcttttcagatcctgaggt

SEQ ID NO: 2694 - DNA, 20 bp, Artificial sequence
  Synthetic oligonucleotide
tcactttttcccaccaagtc

SEQ ID NO: 2695 - DNA, 20 bp, Artificial sequence
  Synthetic oligonucleotide
ttcaggtttttcacccagta

SEQ ID NO: 2696 - DNA, 20 bp, Artificial sequence
  Synthetic oligonucleotide
acccatctcttgcttgccac

SEQ ID NO: 2697 - DNA, 20 bp, Artificial sequence
  Synthetic oligonucleotide
aggttcttacagcctgatca

SEQ ID NO: 2698 - DNA, 20 bp, Artificial sequence
  Synthetic oligonucleotide
tcaatcaatattagcctggc

SEQ ID NO: 2699 - DNA, 20 bp, Artificial sequence
  Synthetic oligonucleotide
cctctgtatatgcaatcccc

SEQ ID NO: 2700 - DNA, 20 bp, Artificial sequence
  Synthetic oligonucleotide
caaatcttattaccaggaaa

SEQ ID NO: 2701 - DNA, 20 bp, Artificial sequence
  Synthetic oligonucleotide
ggctacggtccccatcacca

SEQ ID NO: 2702 - DNA, 20 bp, Artificial sequence
  Synthetic oligonucleotide
ttagcatttcttaggtacac

SEQ ID NO: 2703 - DNA, 20 bp, Artificial sequence
  Synthetic oligonucleotide
gttttcatttttccgagtcc

SEQ ID NO: 2704 - DNA, 20 bp, Artificial sequence
  Synthetic oligonucleotide
gccataaatgtatatcctcc

SEQ ID NO: 2705 - DNA, 20 bp, Artificial sequence
  Synthetic oligonucleotide
ttgcactgcataccggccac

SEQ ID NO: 2706 - DNA, 20 bp, Artificial sequence
  Synthetic oligonucleotide
atgtaccagcctaccccacc

SEQ ID NO: 2707 - DNA, 20 bp, Artificial sequence
  Synthetic oligonucleotide
gcgatacctagcactcctct

SEQ ID NO: 2708 - DNA, 20 bp, Artificial sequence
  Synthetic oligonucleotide
gcaacatggctctctctaca

SEQ ID NO: 2709 - DNA, 20 bp, Artificial sequence
  Synthetic oligonucleotide
cctgtctgcttttcaggact

SEQ ID NO: 2710 - DNA, 20 bp, Artificial sequence
  Synthetic oligonucleotide
tgtcacttatccttgaggct

SEQ ID NO: 2711 - DNA, 20 bp, Artificial sequence
  Synthetic oligonucleotide
atgcactgatttcatacgca

SEQ ID NO: 2712 - DNA, 20 bp, Artificial sequence
  Synthetic oligonucleotide
gtacaagatatctgacactc

SEQ ID NO: 2713 - DNA, 20 bp, Artificial sequence
  Synthetic oligonucleotide
gaacctgctccctaacatcc

SEQ ID NO: 2714 - DNA, 20 bp, Artificial sequence
  Synthetic oligonucleotide
caggacattcttccacatgt

SEQ ID NO: 2715 - DNA, 20 bp, Artificial sequence
  Synthetic oligonucleotide
ttggactccttgctattact

SEQ ID NO: 2716 - DNA, 20 bp, Artificial sequence
  Synthetic oligonucleotide
ggtcttttatcattagccaa

SEQ ID NO: 2717 - DNA, 20 bp, Artificial sequence
  Synthetic oligonucleotide
cccatggtttctatgccgga

SEQ ID NO: 2718 - DNA, 20 bp, Artificial sequence
  Synthetic oligonucleotide
ttatctctctatataaacat

SEQ ID NO: 2719 - DNA, 20 bp, Artificial sequence
  Synthetic oligonucleotide
ctaacattttccttattttc

SEQ ID NO: 2720 - DNA, 20 bp, Artificial sequence
  Synthetic oligonucleotide
ttccaggtacacacccctgc

SEQ ID NO: 2721 - DNA, 20 bp, Artificial sequence
  Synthetic oligonucleotide
ggttcaaattttgacccttc

SEQ ID NO: 2722 - DNA, 20 bp, Artificial sequence
  Synthetic oligonucleotide
cgctactactctgagctttc

SEQ ID NO: 2723 - DNA, 20 bp, Artificial sequence
  Synthetic oligonucleotide
agtacttcagaacccactat

SEQ ID NO: 2724 - DNA, 20 bp, Artificial sequence
  Synthetic oligonucleotide
tagcaatgctgaatacacac

SEQ ID NO: 2725 - DNA, 20 bp, Artificial sequence
  Synthetic oligonucleotide
gctgctgcaaatgactgctc

SEQ ID NO: 2726 - DNA, 20 bp, Artificial sequence
  Synthetic oligonucleotide
tggctccattttaagccctc

SEQ ID NO: 2727 - DNA, 20 bp, Artificial sequence
  Synthetic oligonucleotide
gtatcaacatctgtatctat

SEQ ID NO: 2728 - DNA, 20 bp, Artificial sequence
  Synthetic oligonucleotide
gaaatcttactagctcaagc

SEQ ID NO: 2729 - DNA, 20 bp, Artificial sequence
  Synthetic oligonucleotide
gcatcctcaatgaaacagct

SEQ ID NO: 2730 - DNA, 20 bp, Artificial sequence
  Synthetic oligonucleotide
ttgtaatacactgttgcact

SEQ ID NO: 2731 - DNA, 20 bp, Artificial sequence
  Synthetic oligonucleotide
ggttccttgccatccactct

SEQ ID NO: 2732 - DNA, 20 bp, Artificial sequence
  Synthetic oligonucleotide
cctttaggtatatagcataa

SEQ ID NO: 2733 - DNA, 20 bp, Artificial sequence
  Synthetic oligonucleotide
atggctcttttccttaactc

SEQ ID NO: 2734 - DNA, 20 bp, Artificial sequence
  Synthetic oligonucleotide
gctcttaggataaactccta

SEQ ID NO: 2735 - DNA, 20 bp, Artificial sequence
  Synthetic oligonucleotide
ggcactatgatttaacctct

SEQ ID NO: 2736 - DNA, 20 bp, Artificial sequence
  Synthetic oligonucleotide
ttggtaccatcaagtaccga

SEQ ID NO: 2737 - DNA, 20 bp, Artificial sequence
  Synthetic oligonucleotide
gtggtacatgactaattata

SEQ ID NO: 2738 - DNA, 20 bp, Artificial sequence
  Synthetic oligonucleotide
ttccatcttcaactcctgta

SEQ ID NO: 2739 - DNA, 20 bp, Artificial sequence
  Synthetic oligonucleotide
caggtttttcacccagtagc

SEQ ID NO: 2740 - DNA, 20 bp, Artificial sequence
  Synthetic oligonucleotide
gcctggagttaatataccta

SEQ ID NO: 2741 - DNA, 20 bp, Artificial sequence
  Synthetic oligonucleotide
tcctcaatgaaacagctcca

SEQ ID NO: 2742 - DNA, 20 bp, Artificial sequence
  Synthetic oligonucleotide
tatctctctatataaacata

SEQ ID NO: 2743 - DNA, 20 bp, Artificial sequence
  Synthetic oligonucleotide
gtcctccttattctttagca

SEQ ID NO: 2744 - DNA, 20 bp, Artificial sequence
  Synthetic oligonucleotide
atatctatataaacatatac

SEQ ID NO: 2745 - DNA, 20 bp, Artificial sequence
  Synthetic oligonucleotide
cagaacccactattctaggt

SEQ ID NO: 2746 - DNA, 20 bp, Artificial sequence
  Synthetic oligonucleotide
gttccctatttatagtattc

SEQ ID NO: 2747 - DNA, 20 bp, Artificial sequence
  Synthetic oligonucleotide
ctacatatttgttcctgccc

SEQ ID NO: 2748 - DNA, 20 bp, Artificial sequence
  Synthetic oligonucleotide
tatcagtcattatctcatca

SEQ ID NO: 2749 - DNA, 20 bp, Artificial sequence
  Synthetic oligonucleotide
ttcaaatgatatcaatgagc

SEQ ID NO: 2750 - DNA, 20 bp, Artificial sequence
  Synthetic oligonucleotide
agttgtctgcatcccagcca

SEQ ID NO: 2751 - DNA, 20 bp, Artificial sequence
  Synthetic oligonucleotide
catatatcataaccacatct

SEQ ID NO: 2752 - DNA, 20 bp, Artificial sequence
  Synthetic oligonucleotide
gtgtctatcttcaaccttaa

SEQ ID NO: 2753 - DNA, 20 bp, Artificial sequence
  Synthetic oligonucleotide
ttccgagtcccagttcgcac

SEQ ID NO: 2754 - DNA, 20 bp, Artificial sequence
  Synthetic oligonucleotide
gctccattttaagccctcat

SEQ ID NO: 2755 - DNA, 20 bp, Artificial sequence
  Synthetic oligonucleotide
catcactctagtcctggctt

SEQ ID NO: 2756 - DNA, 20 bp, Artificial sequence
  Synthetic oligonucleotide
cccatctcttgcttgccaca

SEQ ID NO: 2757 - DNA, 20 bp, Artificial sequence
  Synthetic oligonucleotide
tgcacatgcctcaagtgaac

SEQ ID NO: 2758 - DNA, 20 bp, Artificial sequence
  Synthetic oligonucleotide
gttccttgccatccactctt

SEQ ID NO: 2759 - DNA, 20 bp, Artificial sequence
  Synthetic oligonucleotide
aacctgctccctaacatcct

SEQ ID NO: 2760 - DNA, 20 bp, Artificial sequence
  Synthetic oligonucleotide
catcctgtgaccacacttcc

SEQ ID NO: 2761 - DNA, 20 bp, Artificial sequence
  Synthetic oligonucleotide
ggtactttatcataaccata

SEQ ID NO: 2762 - DNA, 20 bp, Artificial sequence
  Synthetic oligonucleotide
atgggtccttcccagtgcat

SEQ ID NO: 2763 - DNA, 20 bp, Artificial sequence
  Synthetic oligonucleotide
cttacacttactttctccac

SEQ ID NO: 2764 - DNA, 20 bp, Artificial sequence
  Synthetic oligonucleotide
taagctccttgatctgattc

SEQ ID NO: 2765 - DNA, 20 bp, Artificial sequence
  Synthetic oligonucleotide
caggtatgttaccttacaca

SEQ ID NO: 2766 - DNA, 20 bp, Artificial sequence
  Synthetic oligonucleotide
ccggactggtcccataggca

SEQ ID NO: 2767 - DNA, 20 bp, Artificial sequence
  Synthetic oligonucleotide
ccacaccctataattcagca

SEQ ID NO: 2768 - DNA, 20 bp, Artificial sequence
  Synthetic oligonucleotide
taaaatatatactaagttaa

SEQ ID NO: 2769 - DNA, 20 bp, Artificial sequence
  Synthetic oligonucleotide
tgtgtcttctagttcatccc

SEQ ID NO: 2770 - DNA, 20 bp, Artificial sequence
  Synthetic oligonucleotide
actggctcatgaaccagtca

SEQ ID NO: 2771 - DNA, 20 bp, Artificial sequence
  Synthetic oligonucleotide
cctatctctattttcctgga

SEQ ID NO: 2772 - DNA, 20 bp, Artificial sequence
  Synthetic oligonucleotide
gtcttacacctgtcccacca

SEQ ID NO: 2773 - DNA, 20 bp, Artificial sequence
  Synthetic oligonucleotide
tctggtaacttctactgtat

SEQ ID NO: 2774 - DNA, 20 bp, Artificial sequence
  Synthetic oligonucleotide
ccgcataaagaatcatgtta

SEQ ID NO: 2775 - DNA, 20 bp, Artificial sequence
  Synthetic oligonucleotide
tgggttacagaattcaactt

SEQ ID NO: 2776 - DNA, 20 bp, Artificial sequence
  Synthetic oligonucleotide
gctcaaacaccatgccgtca

SEQ ID NO: 2777 - DNA, 20 bp, Artificial sequence
  Synthetic oligonucleotide
aagctattttgaacccatgc

SEQ ID NO: 2778 - DNA, 20 bp, Artificial sequence
  Synthetic oligonucleotide
tcaccatgaatatgcagggc

SEQ ID NO: 2779 - DNA, 20 bp, Artificial sequence
  Synthetic oligonucleotide
tcagtggtattaacatccac

SEQ ID NO: 2780 - DNA, 20 bp, Artificial sequence
  Synthetic oligonucleotide
agccagtttcctgaccatcc

SEQ ID NO: 2781 - DNA, 20 bp, Artificial sequence
  Synthetic oligonucleotide
ccctccgacatataagctgc

SEQ ID NO: 2782 - DNA, 20 bp, Artificial sequence
  Synthetic oligonucleotide
gcttcacctagaatcttgct

SEQ ID NO: 2783 - DNA, 20 bp, Artificial sequence
  Synthetic oligonucleotide
tgcactgatttcatacgcac

SEQ ID NO: 2784 - DNA, 20 bp, Artificial sequence
  Synthetic oligonucleotide
gtgaagttctatcacaccat

SEQ ID NO: 2785 - DNA, 20 bp, Artificial sequence
  Synthetic oligonucleotide
cctgatgttctaactcatct

SEQ ID NO: 2786 - DNA, 20 bp, Artificial sequence
  Synthetic oligonucleotide
tgcctgtgttttacctttcc

SEQ ID NO: 2787 - DNA, 20 bp, Artificial sequence
  Synthetic oligonucleotide
acggtccccatcaccagcca

SEQ ID NO: 2788 - DNA, 20 bp, Artificial sequence
  Synthetic oligonucleotide
gccccatgaactgatgctgc

SEQ ID NO: 2789 - DNA, 20 bp, Artificial sequence
  Synthetic oligonucleotide
tcacaagcattcatgacttc

SEQ ID NO: 2790 - DNA, 20 bp, Artificial sequence
  Synthetic oligonucleotide
ctgtatctataaaagactca

SEQ ID NO: 2791 - DNA, 20 bp, Artificial sequence
  Synthetic oligonucleotide
ggactgcacacatttatcac

SEQ ID NO: 2792 - DNA, 20 bp, Artificial sequence
  Synthetic oligonucleotide
tggtcctcttccctggacta

SEQ ID NO: 2793 - DNA, 20 bp, Artificial sequence
  Synthetic oligonucleotide
gtgaaaccccgtatcctgtc

SEQ ID NO: 2794 - DNA, 20 bp, Artificial sequence
  Synthetic oligonucleotide
acttccctcttgaatagcac

SEQ ID NO: 2795 - DNA, 20 bp, Artificial sequence
  Synthetic oligonucleotide
gctttctctgatctacattc

SEQ ID NO: 2796 - DNA, 20 bp, Artificial sequence
  Synthetic oligonucleotide
ccagctgccaacaccttgta

SEQ ID NO: 2797 - DNA, 20 bp, Artificial sequence
  Synthetic oligonucleotide
ccaggtacacacccctgcta

SEQ ID NO: 2798 - DNA, 20 bp, Artificial sequence
  Synthetic oligonucleotide
caatcaatattagcctggct

SEQ ID NO: 2799 - DNA, 20 bp, Artificial sequence
  Synthetic oligonucleotide
cagaaacaccatcactttgc

SEQ ID NO: 2800 - DNA, 20 bp, Artificial sequence
  Synthetic oligonucleotide
tgtaccagcctaccccacct

SEQ ID NO: 2801 - DNA, 20 bp, Artificial sequence
  Synthetic oligonucleotide
tgtaatccatccaccactct

SEQ ID NO: 2802 - DNA, 20 bp, Artificial sequence
  Synthetic oligonucleotide
ctggtctcctctatcatgcc

SEQ ID NO: 2803 - DNA, 20 bp, Artificial sequence
  Synthetic oligonucleotide
actacttacaagctatggcc

SEQ ID NO: 2804 - DNA, 20 bp, Artificial sequence
  Synthetic oligonucleotide
ttccactgctgaatatcagt

SEQ ID NO: 2805 - DNA, 20 bp, Artificial sequence
  Synthetic oligonucleotide
cactttttcccaccaagtct

SEQ ID NO: 2806 - DNA, 20 bp, Artificial sequence
  Synthetic oligonucleotide
ccttcatactgagatagtca

SEQ ID NO: 2807 - DNA, 20 bp, Artificial sequence
  Synthetic oligonucleotide
ctgaaattttctgtatggtc

SEQ ID NO: 2808 - DNA, 20 bp, Artificial sequence
  Synthetic oligonucleotide
gcagatgaagacactttggt

SEQ ID NO: 2809 - DNA, 20 bp, Artificial sequence
  Synthetic oligonucleotide
tacctagcactcctctgctc

SEQ ID NO: 2810 - DNA, 20 bp, Artificial sequence
  Synthetic oligonucleotide
ttgcaccctagtattctatc

SEQ ID NO: 2811 - DNA, 20 bp, Artificial sequence
  Synthetic oligonucleotide
gcagtttgatttctttgatc

SEQ ID NO: 2812 - DNA, 20 bp, Artificial sequence
  Synthetic oligonucleotide
gactccttgctattactgct

SEQ ID NO: 2813 - DNA, 20 bp, Artificial sequence
  Synthetic oligonucleotide
gtttttggattctccatgct

SEQ ID NO: 2814 - DNA, 20 bp, Artificial sequence
  Synthetic oligonucleotide
actgctgaatatcagttctc

SEQ ID NO: 2815 - DNA, 20 bp, Artificial sequence
  Synthetic oligonucleotide
agtagaggttattcttattc

SEQ ID NO: 2816 - DNA, 20 bp, Artificial sequence
  Synthetic oligonucleotide
acctagaatcttgctctcct

SEQ ID NO: 2817 - DNA, 20 bp, Artificial sequence
  Synthetic oligonucleotide
atcagtcattatctcatcaa

SEQ ID NO: 2818 - DNA, 20 bp, Artificial sequence
  Synthetic oligonucleotide
gcagaggtttcacttttccc

SEQ ID NO: 2819 - DNA, 20 bp, Artificial sequence
  Synthetic oligonucleotide
cctacatctcaattctttca

SEQ ID NO: 2820 - DNA, 20 bp, Artificial sequence
  Synthetic oligonucleotide
ctggctcatgaaccagtcat

SEQ ID NO: 2821 - DNA, 20 bp, Artificial sequence
  Synthetic oligonucleotide
tgctgccatcttgatgccat

SEQ ID NO: 2822 - DNA, 20 bp, Artificial sequence
  Synthetic oligonucleotide
atatactaagttaataaaat

SEQ ID NO: 2823 - DNA, 20 bp, Artificial sequence
  Synthetic oligonucleotide
caccatcactttgcccatga

SEQ ID NO: 2824 - DNA, 20 bp, Artificial sequence
  Synthetic oligonucleotide
tggtagtctatgattcacct

SEQ ID NO: 2825 - DNA, 20 bp, Artificial sequence
  Synthetic oligonucleotide
agctattttgaacccatgcc

SEQ ID NO: 2826 - DNA, 20 bp, Artificial sequence
  Synthetic oligonucleotide
gcctgtgttttacctttcca

SEQ ID NO: 2827 - DNA, 20 bp, Artificial sequence
  Synthetic oligonucleotide
gttgtctgcatcccagccaa

SEQ ID NO: 2828 - DNA, 20 bp, Artificial sequence
  Synthetic oligonucleotide
cttccctcttgaatagcaca

SEQ ID NO: 2829 - DNA, 20 bp, Artificial sequence
  Synthetic oligonucleotide
tcacactctccttattgtct

SEQ ID NO: 2830 - DNA, 20 bp, Artificial sequence
  Synthetic oligonucleotide
cagtggtattaacatccaca

SEQ ID NO: 2831 - DNA, 20 bp, Artificial sequence
  Synthetic oligonucleotide
gcatgtatatttatctatat

SEQ ID NO: 2832 - DNA, 20 bp, Artificial sequence
  Synthetic oligonucleotide
gttctatcacaccattcatt

SEQ ID NO: 2833 - DNA, 20 bp, Artificial sequence
  Synthetic oligonucleotide
acaccttgtataactcaggc

SEQ ID NO: 2834 - DNA, 20 bp, Artificial sequence
  Synthetic oligonucleotide
caagcattcatgacttccaa

SEQ ID NO: 2835 - DNA, 20 bp, Artificial sequence
  Synthetic oligonucleotide
ccactcttcaaagaatcctc

SEQ ID NO: 2836 - DNA, 20 bp, Artificial sequence
  Synthetic oligonucleotide
atgatatcatagtcacacca

SEQ ID NO: 2837 - DNA, 20 bp, Artificial sequence
  Synthetic oligonucleotide
ctaaggctagtttttaacca

SEQ ID NO: 2838 - DNA, 20 bp, Artificial sequence
  Synthetic oligonucleotide
agcagactccaactgtggca

SEQ ID NO: 2839 - DNA, 20 bp, Artificial sequence
  Synthetic oligonucleotide
atcctgtgaccacacttcct

SEQ ID NO: 2840 - DNA, 20 bp, Artificial sequence
  Synthetic oligonucleotide
tccatcttcaactcctgtac

SEQ ID NO: 2841 - DNA, 20 bp, Artificial sequence
  Synthetic oligonucleotide
tccctatttatagtattcat

SEQ ID NO: 2842 - DNA, 20 bp, Artificial sequence
  Synthetic oligonucleotide
ttgctcttgctttataggct

SEQ ID NO: 2843 - DNA, 20 bp, Artificial sequence
  Synthetic oligonucleotide
gggatcttatctctttctca

SEQ ID NO: 2844 - DNA, 20 bp, Artificial sequence
  Synthetic oligonucleotide
gcttttcacttacgagccaa

SEQ ID NO: 2845 - DNA, 20 bp, Artificial sequence
  Synthetic oligonucleotide
cctgctccctaacatcctaa

SEQ ID NO: 2846 - DNA, 20 bp, Artificial sequence
  Synthetic oligonucleotide
ccaccatgtttacatttcaa

SEQ ID NO: 2847 - DNA, 20 bp, Artificial sequence
  Synthetic oligonucleotide
tccgagtcccagttcgcaca

SEQ ID NO: 2848 - DNA, 20 bp, Artificial sequence
  Synthetic oligonucleotide
gcatcagttgaataatccct

SEQ ID NO: 2849 - DNA, 20 bp, Artificial sequence
  Synthetic oligonucleotide
acccactattctaggtaact

SEQ ID NO: 2850 - DNA, 20 bp, Artificial sequence
  Synthetic oligonucleotide
cctggagttaatatacctaa

SEQ ID NO: 2851 - DNA, 20 bp, Artificial sequence
  Synthetic oligonucleotide
aggtatgttaccttacacaa

SEQ ID NO: 2852 - DNA, 20 bp, Artificial sequence
  Synthetic oligonucleotide
cactgaacagctcttctgca

SEQ ID NO: 2853 - DNA, 20 bp, Artificial sequence
  Synthetic oligonucleotide
gccacttttctactacatat

SEQ ID NO: 2854 - DNA, 20 bp, Artificial sequence
  Synthetic oligonucleotide
gtccaactacagcccttggc

SEQ ID NO: 2855 - DNA, 20 bp, Artificial sequence
  Synthetic oligonucleotide
ctagcactcctctgctccca

SEQ ID NO: 2856 - DNA, 20 bp, Artificial sequence
  Synthetic oligonucleotide
gtaccagcctaccccacctc

SEQ ID NO: 2857 - DNA, 20 bp, Artificial sequence
  Synthetic oligonucleotide
gctccttgatctgattcttt

SEQ ID NO: 2858 - DNA, 20 bp, Artificial sequence
  Synthetic oligonucleotide
agctgagccactgactaatc

SEQ ID NO: 2859 - DNA, 20 bp, Artificial sequence
  Synthetic oligonucleotide
gcacctctccatgaacttgc

SEQ ID NO: 2860 - DNA, 20 bp, Artificial sequence
  Synthetic oligonucleotide
tggttgtagcttccttgtct

SEQ ID NO: 2861 - DNA, 20 bp, Artificial sequence
  Synthetic oligonucleotide
tctctctatataaacatata

SEQ ID NO: 2862 - DNA, 20 bp, Artificial sequence
  Synthetic oligonucleotide
cccgtatcctgtctctacta

SEQ ID NO: 2863 - DNA, 20 bp, Artificial sequence
  Synthetic oligonucleotide
tggtgtcactgatttatgcc

SEQ ID NO: 2864 - DNA, 20 bp, Artificial sequence
  Synthetic oligonucleotide
ggtaccatcaagtaccgacc

SEQ ID NO: 2865 - DNA, 20 bp, Artificial sequence
  Synthetic oligonucleotide
cggtccccatcaccagccat

SEQ ID NO: 2866 - DNA, 20 bp, Artificial sequence
  Synthetic oligonucleotide
atccaccactctccacctct

SEQ ID NO: 2867 - DNA, 20 bp, Artificial sequence
  Synthetic oligonucleotide
atgacaggtcttctacatcc

SEQ ID NO: 2868 - DNA, 20 bp, Artificial sequence
  Synthetic oligonucleotide
caggcatttgtatacgatac

SEQ ID NO: 2869 - DNA, 20 bp, Artificial sequence
  Synthetic oligonucleotide
gccagtttcctgaccatcct

SEQ ID NO: 2870 - DNA, 20 bp, Artificial sequence
  Synthetic oligonucleotide
tcaaccttaaaatctcaggg

SEQ ID NO: 2871 - DNA, 20 bp, Artificial sequence
  Synthetic oligonucleotide
gactgcacacatttatcacc

SEQ ID NO: 2872 - DNA, 20 bp, Artificial sequence
  Synthetic oligonucleotide
ctccattttaagccctcatc

SEQ ID NO: 2873 - DNA, 20 bp, Artificial sequence
  Synthetic oligonucleotide
atctggtccttccatgcctc

SEQ ID NO: 2874 - DNA, 20 bp, Artificial sequence
  Synthetic oligonucleotide
ctggtcccataggcaccatc

SEQ ID NO: 2875 - DNA, 20 bp, Artificial sequence
  Synthetic oligonucleotide
cctcaagtgaaccactgaaa

SEQ ID NO: 2876 - DNA, 20 bp, Artificial sequence
  Synthetic oligonucleotide
atgttagtcacaacctaccg

SEQ ID NO: 2877 - DNA, 20 bp, Artificial sequence
  Synthetic oligonucleotide
ttgtactacttctgcctgca

SEQ ID NO: 2878 - DNA, 20 bp, Artificial sequence
  Synthetic oligonucleotide
aatggttgtcaatcacagct

SEQ ID NO: 2879 - DNA, 20 bp, Artificial sequence
  Synthetic oligonucleotide
tgttcataatataagctccc

SEQ ID NO: 2880 - DNA, 20 bp, Artificial sequence
  Synthetic oligonucleotide
tggttcccaccaagtttctt

SEQ ID NO: 2881 - DNA, 20 bp, Artificial sequence
  Synthetic oligonucleotide
tcataaccacatcttcttcc

SEQ ID NO: 2882 - DNA, 20 bp, Artificial sequence
  Synthetic oligonucleotide
gggttacagaattcaactta

SEQ ID NO: 2883 - DNA, 20 bp, Artificial sequence
  Synthetic oligonucleotide
gccatttcttaaatggacat

SEQ ID NO: 2884 - DNA, 20 bp, Artificial sequence
  Synthetic oligonucleotide
tggtctcctctatcatgcca

SEQ ID NO: 2885 - DNA, 20 bp, Artificial sequence
  Synthetic oligonucleotide
attctatattaaatgcaggt

SEQ ID NO: 2886 - DNA, 20 bp, Artificial sequence
  Synthetic oligonucleotide
tttcacccagtagccagctt

SEQ ID NO: 2887 - DNA, 20 bp, Artificial sequence
  Synthetic oligonucleotide
tcccaccatttattttggaa

SEQ ID NO: 2888 - DNA, 20 bp, Artificial sequence
  Synthetic oligonucleotide
tacatatttgttcctgccct

SEQ ID NO: 2889 - DNA, 20 bp, Artificial sequence
  Synthetic oligonucleotide
tccttatatacgactacact

SEQ ID NO: 2890 - DNA, 20 bp, Artificial sequence
  Synthetic oligonucleotide
gcagcattctctgtacaact

SEQ ID NO: 2891 - DNA, 20 bp, Artificial sequence
  Synthetic oligonucleotide
caggtcttctacatccttag

SEQ ID NO: 2892 - DNA, 20 bp, Artificial sequence
  Synthetic oligonucleotide
gctattttgaacccatgcct

SEQ ID NO: 2893 - DNA, 20 bp, Artificial sequence
  Synthetic oligonucleotide
caaccttaaaatctcagggc

SEQ ID NO: 2894 - DNA, 20 bp, Artificial sequence
  Synthetic oligonucleotide
atgctggtaactactttctc

SEQ ID NO: 2895 - DNA, 20 bp, Artificial sequence
  Synthetic oligonucleotide
gtaccatcaagtaccgacca

SEQ ID NO: 2896 - DNA, 20 bp, Artificial sequence
  Synthetic oligonucleotide
ggaaactctttatccaggcc

SEQ ID NO: 2897 - DNA, 20 bp, Artificial sequence
  Synthetic oligonucleotide
tggctgtttgttattcccct

SEQ ID NO: 2898 - DNA, 20 bp, Artificial sequence
  Synthetic oligonucleotide
aggcaccatctccctaccat

SEQ ID NO: 2899 - DNA, 20 bp, Artificial sequence
  Synthetic oligonucleotide
aggctagtttttaaccaagt

SEQ ID NO: 2900 - DNA, 20 bp, Artificial sequence
  Synthetic oligonucleotide
caccttgtataactcaggca

SEQ ID NO: 2901 - DNA, 20 bp, Artificial sequence
  Synthetic oligonucleotide
tcttttctctgtatccgctt

SEQ ID NO: 2902 - DNA, 20 bp, Artificial sequence
  Synthetic oligonucleotide
ggttttctctagtaagcccc

SEQ ID NO: 2903 - DNA, 20 bp, Artificial sequence
  Synthetic oligonucleotide
ccagttcgcacacatggtta

SEQ ID NO: 2904 - DNA, 20 bp, Artificial sequence
  Synthetic oligonucleotide
gcttcagtttatcaagaggt

SEQ ID NO: 2905 - DNA, 20 bp, Artificial sequence
  Synthetic oligonucleotide
catgtatatttatctatata

SEQ ID NO: 2906 - DNA, 20 bp, Artificial sequence
  Synthetic oligonucleotide
tagtctatgattcacctgct

SEQ ID NO: 2907 - DNA, 20 bp, Artificial sequence
  Synthetic oligonucleotide
agtggtattaacatccacaa

SEQ ID NO: 2908 - DNA, 20 bp, Artificial sequence
  Synthetic oligonucleotide
ggcagcacacatcaagggtt

SEQ ID NO: 2909 - DNA, 20 bp, Artificial sequence
  Synthetic oligonucleotide
tggtcatgctcccatatggc

SEQ ID NO: 2910 - DNA, 20 bp, Artificial sequence
  Synthetic oligonucleotide
tgctccctaacatcctaagc

SEQ ID NO: 2911 - DNA, 20 bp, Artificial sequence
  Synthetic oligonucleotide
cactactatagtctaagtcc

SEQ ID NO: 2912 - DNA, 20 bp, Artificial sequence
  Synthetic oligonucleotide
gcagactccaactgtggcat

SEQ ID NO: 2913 - DNA, 20 bp, Artificial sequence
  Synthetic oligonucleotide
gccatctctgccatatgaac

SEQ ID NO: 2914 - DNA, 20 bp, Artificial sequence
  Synthetic oligonucleotide
gaaggcttacagccttcatc

SEQ ID NO: 2915 - DNA, 20 bp, Artificial sequence
  Synthetic oligonucleotide
ccccacctccttcatacagc

SEQ ID NO: 2916 - DNA, 20 bp, Artificial sequence
  Synthetic oligonucleotide
ggatcttatctctttctcaa

SEQ ID NO: 2917 - DNA, 20 bp, Artificial sequence
  Synthetic oligonucleotide
tatcatctagacttctaggc

SEQ ID NO: 2918 - DNA, 20 bp, Artificial sequence
  Synthetic oligonucleotide
aggtagcaagtattccagct

SEQ ID NO: 2919 - DNA, 20 bp, Artificial sequence
  Synthetic oligonucleotide
tgctcttgctttataggcta

SEQ ID NO: 2920 - DNA, 20 bp, Artificial sequence
  Synthetic oligonucleotide
tcagtcattatctcatcaac

SEQ ID NO: 2921 - DNA, 20 bp, Artificial sequence
  Synthetic oligonucleotide
cctcttgaatagcacaccta

SEQ ID NO: 2922 - DNA, 20 bp, Artificial sequence
  Synthetic oligonucleotide
tggaatgccctctttctacc

SEQ ID NO: 2923 - DNA, 20 bp, Artificial sequence
  Synthetic oligonucleotide
gtagtaacaagaccttccaa

SEQ ID NO: 2924 - DNA, 20 bp, Artificial sequence
  Synthetic oligonucleotide
atggttgtcaatcacagcta

SEQ ID NO: 2925 - DNA, 20 bp, Artificial sequence
  Synthetic oligonucleotide
tgtctatctctgtatcacga

SEQ ID NO: 2926 - DNA, 20 bp, Artificial sequence
  Synthetic oligonucleotide
ggtcaaggctcacctcctct

SEQ ID NO: 2927 - DNA, 20 bp, Artificial sequence
  Synthetic oligonucleotide
atcttcttcctctgtacgca

SEQ ID NO: 2928 - DNA, 20 bp, Artificial sequence
  Synthetic oligonucleotide
ggtaactggatactcatcta

SEQ ID NO: 2929 - DNA, 20 bp, Artificial sequence
  Synthetic oligonucleotide
gctgagccactgactaatca

SEQ ID NO: 2930 - DNA, 20 bp, Artificial sequence
  Synthetic oligonucleotide
acgactacactgtttgactt

SEQ ID NO: 2931 - DNA, 20 bp, Artificial sequence
  Synthetic oligonucleotide
tgttagtcacaacctaccga

SEQ ID NO: 2932 - DNA, 20 bp, Artificial sequence
  Synthetic oligonucleotide
tccaactacagcccttggca

SEQ ID NO: 2933 - DNA, 20 bp, Artificial sequence
  Synthetic oligonucleotide
gcaggtatatactatgtagt

SEQ ID NO: 2934 - DNA, 20 bp, Artificial sequence
  Synthetic oligonucleotide
tcccaccaagtttcttgtgt

SEQ ID NO: 2935 - DNA, 20 bp, Artificial sequence
  Synthetic oligonucleotide
cctctacttttagctctgga

SEQ ID NO: 2936 - DNA, 20 bp, Artificial sequence
  Synthetic oligonucleotide
ggctcatgaaccagtcatca

SEQ ID NO: 2937 - DNA, 20 bp, Artificial sequence
  Synthetic oligonucleotide
atcctttatcagccagtcct

SEQ ID NO: 2938 - DNA, 20 bp, Artificial sequence
  Synthetic oligonucleotide
atgccatggacactttgact

SEQ ID NO: 2939 - DNA, 20 bp, Artificial sequence
  Synthetic oligonucleotide
aggccagttttcactttgca

SEQ ID NO: 2940 - DNA, 20 bp, Artificial sequence
  Synthetic oligonucleotide
tggtgacattatctcagagc

SEQ ID NO: 2941 - DNA, 20 bp, Artificial sequence
  Synthetic oligonucleotide
atactaagttaataaaatat

SEQ ID NO: 2942 - DNA, 20 bp, Artificial sequence
  Synthetic oligonucleotide
tgtccattgttttacctatc

SEQ ID NO: 2943 - DNA, 20 bp, Artificial sequence
  Synthetic oligonucleotide
atgacttccaattatctgca

SEQ ID NO: 2944 - DNA, 20 bp, Artificial sequence
  Synthetic oligonucleotide
tgctaacttgatcccaccac

SEQ ID NO: 2945 - DNA, 20 bp, Artificial sequence
  Synthetic oligonucleotide
tctctatataaacatataca

SEQ ID NO: 2946 - DNA, 20 bp, Artificial sequence
  Synthetic oligonucleotide
ggtctcctctatcatgccat

SEQ ID NO: 2947 - DNA, 20 bp, Artificial sequence
  Synthetic oligonucleotide
ccctcatccttatttattca

SEQ ID NO: 2948 - DNA, 20 bp, Artificial sequence
  Synthetic oligonucleotide
gtagaggttattcttattcc

SEQ ID NO: 2949 - DNA, 20 bp, Artificial sequence
  Synthetic oligonucleotide
aggaccacccttcactcatt

SEQ ID NO: 2950 - DNA, 20 bp, Artificial sequence
  Synthetic oligonucleotide
acttcacttaatcaatcagt

SEQ ID NO: 2951 - DNA, 20 bp, Artificial sequence
  Synthetic oligonucleotide
atatcatagtcacaccatct

SEQ ID NO: 2952 - DNA, 20 bp, Artificial sequence
  Synthetic oligonucleotide
ctggagttaatatacctaac

SEQ ID NO: 2953 - DNA, 20 bp, Artificial sequence
  Synthetic oligonucleotide
gttccaaatactagctgccc

SEQ ID NO: 2954 - DNA, 20 bp, Artificial sequence
  Synthetic oligonucleotide
gggtttgtaaaccaaacttc

SEQ ID NO: 2955 - DNA, 20 bp, Artificial sequence
  Synthetic oligonucleotide
agcattcatgacttccaaca

SEQ ID NO: 2956 - DNA, 20 bp, Artificial sequence
  Synthetic oligonucleotide
accatcactttgcccatgat

SEQ ID NO: 2957 - DNA, 20 bp, Artificial sequence
  Synthetic oligonucleotide
tcgagattagatcatatgtt

SEQ ID NO: 2958 - DNA, 20 bp, Artificial sequence
  Synthetic oligonucleotide
gcctcttattattatctgaa

SEQ ID NO: 2959 - DNA, 20 bp, Artificial sequence
  Synthetic oligonucleotide
acaggctttcattagatctc

SEQ ID NO: 2960 - DNA, 20 bp, Artificial sequence
  Synthetic oligonucleotide
agcttccctaaccaatgcat

SEQ ID NO: 2961 - DNA, 20 bp, Artificial sequence
  Synthetic oligonucleotide
actgaacagctcttctgcac

SEQ ID NO: 2962 - DNA, 20 bp, Artificial sequence
  Synthetic oligonucleotide
agaggtttcacttttcccca

SEQ ID NO: 2963 - DNA, 20 bp, Artificial sequence
  Synthetic oligonucleotide
gtttcaaatctgccacaccc

SEQ ID NO: 2964 - DNA, 20 bp, Artificial sequence
  Synthetic oligonucleotide
tgctcacaatgatatagcaa

SEQ ID NO: 2965 - DNA, 20 bp, Artificial sequence
  Synthetic oligonucleotide
ttgtctgcatcccagccaac

SEQ ID NO: 2966 - DNA, 20 bp, Artificial sequence
  Synthetic oligonucleotide
gcagatctgtaataaaccat

SEQ ID NO: 2967 - DNA, 20 bp, Artificial sequence
  Synthetic oligonucleotide
atcatgctcagtcatccctc

SEQ ID NO: 2968 - DNA, 20 bp, Artificial sequence
  Synthetic oligonucleotide
gtggacattttgaacaagga

SEQ ID NO: 2969 - DNA, 20 bp, Artificial sequence
  Synthetic oligonucleotide
tcttcttcctctgtacgcac

SEQ ID NO: 2970 - DNA, 20 bp, Artificial sequence
  Synthetic oligonucleotide
gctcacctcctctaagatgc

SEQ ID NO: 2971 - DNA, 20 bp, Artificial sequence
  Synthetic oligonucleotide
tcaacataatagtcctaact

SEQ ID NO: 2972 - DNA, 20 bp, Artificial sequence
  Synthetic oligonucleotide
ggccagttttcactttgcaa

SEQ ID NO: 2973 - DNA, 20 bp, Artificial sequence
  Synthetic oligonucleotide
ccacccttcactcattgtct

SEQ ID NO: 2974 - DNA, 20 bp, Artificial sequence
  Synthetic oligonucleotide
accaaaccagcctacttctc

SEQ ID NO: 2975 - DNA, 20 bp, Artificial sequence
  Synthetic oligonucleotide
tggcaatagctccctggtca

SEQ ID NO: 2976 - DNA, 20 bp, Artificial sequence
  Synthetic oligonucleotide
ttccaaatactagctgccct

SEQ ID NO: 2977 - DNA, 20 bp, Artificial sequence
  Synthetic oligonucleotide
ggtctggtacttacttggca

SEQ ID NO: 2978 - DNA, 20 bp, Artificial sequence
  Synthetic oligonucleotide
aggtcttctacatccttaga

SEQ ID NO: 2979 - DNA, 20 bp, Artificial sequence
  Synthetic oligonucleotide
ggatactcatctatagcagt

SEQ ID NO: 2980 - DNA, 20 bp, Artificial sequence
  Synthetic oligonucleotide
ccatcaagtaccgaccactt

SEQ ID NO: 2981 - DNA, 20 bp, Artificial sequence
  Synthetic oligonucleotide
aaggcttacagccttcatct

SEQ ID NO: 2982 - DNA, 20 bp, Artificial sequence
  Synthetic oligonucleotide
gagcaggtatcatacaagga

SEQ ID NO: 2983 - DNA, 20 bp, Artificial sequence
  Synthetic oligonucleotide
tctctgtatccgctttttcc

SEQ ID NO: 2984 - DNA, 20 bp, Artificial sequence
  Synthetic oligonucleotide
atctaaacatatacatgtgc

SEQ ID NO: 2985 - DNA, 20 bp, Artificial sequence
  Synthetic oligonucleotide
gtcacaacctaccgaactga

SEQ ID NO: 2986 - DNA, 20 bp, Artificial sequence
  Synthetic oligonucleotide
tactaagttaataaaatata

SEQ ID NO: 2987 - DNA, 20 bp, Artificial sequence
  Synthetic oligonucleotide
ccatcactttgcccatgata

SEQ ID NO: 2988 - DNA, 20 bp, Artificial sequence
  Synthetic oligonucleotide
ctgcaagctgtctcattcct

SEQ ID NO: 2989 - DNA, 20 bp, Artificial sequence
  Synthetic oligonucleotide
tcgcacacatggttaactct

SEQ ID NO: 2990 - DNA, 20 bp, Artificial sequence
  Synthetic oligonucleotide
gtctgcatcccagccaacac

SEQ ID NO: 2991 - DNA, 20 bp, Artificial sequence
  Synthetic oligonucleotide
tccaattatctgcactgata

SEQ ID NO: 2992 - DNA, 20 bp, Artificial sequence
  Synthetic oligonucleotide
gctctgatgatatcagcccc

SEQ ID NO: 2993 - DNA, 20 bp, Artificial sequence
  Synthetic oligonucleotide
gccatggacactttgacttt

SEQ ID NO: 2994 - DNA, 20 bp, Artificial sequence
  Synthetic oligonucleotide
gcaccatctccctaccatgt

SEQ ID NO: 2995 - DNA, 20 bp, Artificial sequence
  Synthetic oligonucleotide
gctccctaacatcctaagcc

SEQ ID NO: 2996 - DNA, 20 bp, Artificial sequence
  Synthetic oligonucleotide
ctccattcttccattatcag

SEQ ID NO: 2997 - DNA, 20 bp, Artificial sequence
  Synthetic oligonucleotide
gcctgcaacaaatatctcat

SEQ ID NO: 2998 - DNA, 20 bp, Artificial sequence
  Synthetic oligonucleotide
gactcctttgactaaggccc

SEQ ID NO: 2999 - DNA, 20 bp, Artificial sequence
  Synthetic oligonucleotide
gcattcatgacttccaacaa

SEQ ID NO: 3000 - DNA, 20 bp, Artificial sequence
  Synthetic oligonucleotide
atgggcttctctgcctagtc

SEQ ID NO: 3001 - DNA, 20 bp, Artificial sequence
  Synthetic oligonucleotide
tgcatatttcattcattagc

SEQ ID NO: 3002 - DNA, 20 bp, Artificial sequence
  Synthetic oligonucleotide
accttgtataactcaggcac

SEQ ID NO: 3003 - DNA, 20 bp, Artificial sequence
  Synthetic oligonucleotide
tctctgccatatgaacttcc

SEQ ID NO: 3004 - DNA, 20 bp, Artificial sequence
  Synthetic oligonucleotide
tggtattattcttatttcga

SEQ ID NO: 3005 - DNA, 20 bp, Artificial sequence
  Synthetic oligonucleotide
atagcacacctaatcaaggg

SEQ ID NO: 3006 - DNA, 20 bp, Artificial sequence
  Synthetic oligonucleotide
tagaggttattcttattccc

SEQ ID NO: 3007 - DNA, 20 bp, Artificial sequence
  Synthetic oligonucleotide
ccaccttatttgcctcacat

SEQ ID NO: 3008 - DNA, 20 bp, Artificial sequence
  Synthetic oligonucleotide
ctcctctatcatgccatgca

SEQ ID NO: 3009 - DNA, 20 bp, Artificial sequence
  Synthetic oligonucleotide
acccaactcaaatcctgtcc

SEQ ID NO: 3010 - DNA, 20 bp, Artificial sequence
  Synthetic oligonucleotide
atgctcccatatggccatca

SEQ ID NO: 3011 - DNA, 20 bp, Artificial sequence
  Synthetic oligonucleotide
ggctagtttttaaccaagta

SEQ ID NO: 3012 - DNA, 20 bp, Artificial sequence
  Synthetic oligonucleotide
ctctacttttagctctggaa

SEQ ID NO: 3013 - DNA, 20 bp, Artificial sequence
  Synthetic oligonucleotide
cagggcacatggaccaagac

SEQ ID NO: 3014 - DNA, 20 bp, Artificial sequence
  Synthetic oligonucleotide
ctctatataaacatatacat

SEQ ID NO: 3015 - DNA, 20 bp, Artificial sequence
  Synthetic oligonucleotide
attatctcatcaacatttac

SEQ ID NO: 3016 - DNA, 20 bp, Artificial sequence
  Synthetic oligonucleotide
gtccattgttttacctatca

SEQ ID NO: 3017 - DNA, 20 bp, Artificial sequence
  Synthetic oligonucleotide
gctcatgaaccagtcatcaa

SEQ ID NO: 3018 - DNA, 20 bp, Artificial sequence
  Synthetic oligonucleotide
gctcttgctttataggctat

SEQ ID NO: 3019 - DNA, 20 bp, Artificial sequence
  Synthetic oligonucleotide
ggtgattgatcaaatcagct

SEQ ID NO: 3020 - DNA, 20 bp, Artificial sequence
  Synthetic oligonucleotide
tgctggtaactactttctca

SEQ ID NO: 3021 - DNA, 20 bp, Artificial sequence
  Synthetic oligonucleotide
aggctttcattagatctcct

SEQ ID NO: 3022 - DNA, 20 bp, Artificial sequence
  Synthetic oligonucleotide
acagagttttggccttccct

SEQ ID NO: 3023 - DNA, 20 bp, Artificial sequence
  Synthetic oligonucleotide
gaaactctttatccaggccc

SEQ ID NO: 3024 - DNA, 20 bp, Artificial sequence
  Synthetic oligonucleotide
gtctatgattcacctgcttt

SEQ ID NO: 3025 - DNA, 20 bp, Artificial sequence
  Synthetic oligonucleotide
ctgaacagctcttctgcact

SEQ ID NO: 3026 - DNA, 20 bp, Artificial sequence
  Synthetic oligonucleotide
ttgtacatattaatacctgg

SEQ ID NO: 3027 - DNA, 20 bp, Artificial sequence
  Synthetic oligonucleotide
gtgtagccatcactactttc

SEQ ID NO: 3028 - DNA, 20 bp, Artificial sequence
  Synthetic oligonucleotide
tggttgtcaatcacagctac

SEQ ID NO: 3029 - DNA, 20 bp, Artificial sequence
  Synthetic oligonucleotide
ggtgacattatctcagagcc

SEQ ID NO: 3030 - DNA, 20 bp, Artificial sequence
  Synthetic oligonucleotide
gccagagtctacactctgct

SEQ ID NO: 3031 - DNA, 20 bp, Artificial sequence
  Synthetic oligonucleotide
ctggaactagaagctccaac

SEQ ID NO: 3032 - DNA, 20 bp, Artificial sequence
  Synthetic oligonucleotide
aagactctacctactcacca

SEQ ID NO: 3033 - DNA, 20 bp, Artificial sequence
  Synthetic oligonucleotide
ggaccacctatctccatggt

SEQ ID NO: 3034 - DNA, 20 bp, Artificial sequence
  Synthetic oligonucleotide
gcagctctctcatttgggcg

SEQ ID NO: 3035 - DNA, 20 bp, Artificial sequence
  Synthetic oligonucleotide
ctgtctgaatagcatcaatc

SEQ ID NO: 3036 - DNA, 20 bp, Artificial sequence
  Synthetic oligonucleotide
ttcatacagccttccttggc

SEQ ID NO: 3037 - DNA, 20 bp, Artificial sequence
  Synthetic oligonucleotide
tccagaatctttaattgtcc

SEQ ID NO: 3038 - DNA, 20 bp, Artificial sequence
  Synthetic oligonucleotide
ctccttcatcatacctacta

SEQ ID NO: 3039 - DNA, 20 bp, Artificial sequence
  Synthetic oligonucleotide
attgcactgtttatctcact

SEQ ID NO: 3040 - DNA, 20 bp, Artificial sequence
  Synthetic oligonucleotide
gagccactgactaatcagca

SEQ ID NO: 3041 - DNA, 20 bp, Artificial sequence
  Synthetic oligonucleotide
atgccctctttctacccagt

SEQ ID NO: 3042 - DNA, 20 bp, Artificial sequence
  Synthetic oligonucleotide
gcatctgcactcttctttta

SEQ ID NO: 3043 - DNA, 20 bp, Artificial sequence
  Synthetic oligonucleotide
ctgtatcacgaccacagtct

SEQ ID NO: 3044 - DNA, 20 bp, Artificial sequence
  Synthetic oligonucleotide
ctctgtatccgctttttcct

SEQ ID NO: 3045 - DNA, 20 bp, Artificial sequence
  Synthetic oligonucleotide
gtgctcacttatcatgtgga

SEQ ID NO: 3046 - DNA, 20 bp, Artificial sequence
  Synthetic oligonucleotide
gtgattgatcaaatcagctt

SEQ ID NO: 3047 - DNA, 20 bp, Artificial sequence
  Synthetic oligonucleotide
gtacatattaatacctgggt

SEQ ID NO: 3048 - DNA, 20 bp, Artificial sequence
  Synthetic oligonucleotide
tccctaacatcctaagccaa

SEQ ID NO: 3049 - DNA, 20 bp, Artificial sequence
  Synthetic oligonucleotide
gcaccataatcactccagag

SEQ ID NO: 3050 - DNA, 20 bp, Artificial sequence
  Synthetic oligonucleotide
tgaacagctcttctgcacta

SEQ ID NO: 3051 - DNA, 20 bp, Artificial sequence
  Synthetic oligonucleotide
ccattcttccattatcagag

SEQ ID NO: 3052 - DNA, 20 bp, Artificial sequence
  Synthetic oligonucleotide
gcatcagtatagaactccat

SEQ ID NO: 3053 - DNA, 20 bp, Artificial sequence
  Synthetic oligonucleotide
gtcttctacatccttagagc

SEQ ID NO: 3054 - DNA, 20 bp, Artificial sequence
  Synthetic oligonucleotide
ctgcagcaagaaatacaggc

SEQ ID NO: 3055 - DNA, 20 bp, Artificial sequence
  Synthetic oligonucleotide
gatactcatctatagcagtt

SEQ ID NO: 3056 - DNA, 20 bp, Artificial sequence
  Synthetic oligonucleotide
gaggcatgcaagcccactca

SEQ ID NO: 3057 - DNA, 20 bp, Artificial sequence
  Synthetic oligonucleotide
tacatgtttatctatctatc

SEQ ID NO: 3058 - DNA, 20 bp, Artificial sequence
  Synthetic oligonucleotide
gccccatgctcagaatcact

SEQ ID NO: 3059 - DNA, 20 bp, Artificial sequence
  Synthetic oligonucleotide
ccttgtataactcaggcacc

SEQ ID NO: 3060 - DNA, 20 bp, Artificial sequence
  Synthetic oligonucleotide
tggcaacctcccttctgtcc

SEQ ID NO: 3061 - DNA, 20 bp, Artificial sequence
  Synthetic oligonucleotide
gccacacatttccagtctcc

SEQ ID NO: 3062 - DNA, 20 bp, Artificial sequence
  Synthetic oligonucleotide
tgcctgtgccttcaacatct

SEQ ID NO: 3063 - DNA, 20 bp, Artificial sequence
  Synthetic oligonucleotide
gccactgactaatcagcaga

SEQ ID NO: 3064 - DNA, 20 bp, Artificial sequence
  Synthetic oligonucleotide
ctgccatatgaacttcctat

SEQ ID NO: 3065 - DNA, 20 bp, Artificial sequence
  Synthetic oligonucleotide
gttcacatgaattcatggtc

SEQ ID NO: 3066 - DNA, 20 bp, Artificial sequence
  Synthetic oligonucleotide
gaagcacttcctcttaacca

SEQ ID NO: 3067 - DNA, 20 bp, Artificial sequence
  Synthetic oligonucleotide
tggacactttgactttgtgc

SEQ ID NO: 3068 - DNA, 20 bp, Artificial sequence
  Synthetic oligonucleotide
ccaaggctgctaccggtctt

SEQ ID NO: 3069 - DNA, 20 bp, Artificial sequence
  Synthetic oligonucleotide
ttgcactgtttatctcactt

SEQ ID NO: 3070 - DNA, 20 bp, Artificial sequence
  Synthetic oligonucleotide
tgggcttctctgcctagtcc

SEQ ID NO: 3071 - DNA, 20 bp, Artificial sequence
  Synthetic oligonucleotide
attccccttatgcttcaggc

SEQ ID NO: 3072 - DNA, 20 bp, Artificial sequence
  Synthetic oligonucleotide
cccaactcaaatcctgtcca

SEQ ID NO: 3073 - DNA, 20 bp, Artificial sequence
  Synthetic oligonucleotide
gcccatgatatgctttctgc

SEQ ID NO: 3074 - DNA, 20 bp, Artificial sequence
  Synthetic oligonucleotide
agtctgtatcaacttccagt

SEQ ID NO: 3075 - DNA, 20 bp, Artificial sequence
  Synthetic oligonucleotide
gcacatggaccaagaccatc

SEQ ID NO: 3076 - DNA, 20 bp, Artificial sequence
  Synthetic oligonucleotide
aaccagcctacttctctcat

SEQ ID NO: 3077 - DNA, 20 bp, Artificial sequence
  Synthetic oligonucleotide
tgccctctttctacccagtc

SEQ ID NO: 3078 - DNA, 20 bp, Artificial sequence
  Synthetic oligonucleotide
tctaaacatatacatgtgca

SEQ ID NO: 3079 - DNA, 20 bp, Artificial sequence
  Synthetic oligonucleotide
aagctcttgatcaccatttc

SEQ ID NO: 3080 - DNA, 20 bp, Artificial sequence
  Synthetic oligonucleotide
gtatcacgaccacagtctct

SEQ ID NO: 3081 - DNA, 20 bp, Artificial sequence
  Synthetic oligonucleotide
cttcttcctctgtacgcaca

SEQ ID NO: 3082 - DNA, 20 bp, Artificial sequence
  Synthetic oligonucleotide
gctggtaactactttctcag

SEQ ID NO: 3083 - DNA, 20 bp, Artificial sequence
  Synthetic oligonucleotide
ttgcaaggtcatgactgcat

SEQ ID NO: 3084 - DNA, 20 bp, Artificial sequence
  Synthetic oligonucleotide
agcaactgtttctttagcta

SEQ ID NO: 3085 - DNA, 20 bp, Artificial sequence
  Synthetic oligonucleotide
tcctctatcatgccatgcac

SEQ ID NO: 3086 - DNA, 20 bp, Artificial sequence
  Synthetic oligonucleotide
tagttcttacaacaatgtca

SEQ ID NO: 3087 - DNA, 20 bp, Artificial sequence
  Synthetic oligonucleotide
ttgcgagcacccaggtgtct

SEQ ID NO: 3088 - DNA, 20 bp, Artificial sequence
  Synthetic oligonucleotide
atgccgctttctcactccac

SEQ ID NO: 3089 - DNA, 20 bp, Artificial sequence
  Synthetic oligonucleotide
tagcacacctaatcaagggt

SEQ ID NO: 3090 - DNA, 20 bp, Artificial sequence
  Synthetic oligonucleotide
acatggttaactctggcggt

SEQ ID NO: 3091 - DNA, 20 bp, Artificial sequence
  Synthetic oligonucleotide
tcctagttatagccatccta

SEQ ID NO: 3092 - DNA, 20 bp, Artificial sequence
  Synthetic oligonucleotide
agaggttattcttattcccc

SEQ ID NO: 3093 - DNA, 20 bp, Artificial sequence
  Synthetic oligonucleotide
agccacctctagccctggcc

SEQ ID NO: 3094 - DNA, 20 bp, Artificial sequence
  Synthetic oligonucleotide
gcacaatcactacagcgggc

SEQ ID NO: 3095 - DNA, 20 bp, Artificial sequence
  Synthetic oligonucleotide
gcttcacctttcacatacac

SEQ ID NO: 3096 - DNA, 20 bp, Artificial sequence
  Synthetic oligonucleotide
gctgacctttctgccacatc

SEQ ID NO: 3097 - DNA, 20 bp, Artificial sequence
  Synthetic oligonucleotide
ccctcacttctgcatcatca

SEQ ID NO: 3098 - DNA, 20 bp, Artificial sequence
  Synthetic oligonucleotide
ctgcactgatatggaaggcc

SEQ ID NO: 3099 - DNA, 20 bp, Artificial sequence
  Synthetic oligonucleotide
gctctatagtgaccccaacc

SEQ ID NO: 3100 - DNA, 20 bp, Artificial sequence
  Synthetic oligonucleotide
gtgacattatctcagagcct

SEQ ID NO: 3101 - DNA, 20 bp, Artificial sequence
  Synthetic oligonucleotide
tggctgagtttctcatagta

SEQ ID NO: 3102 - DNA, 20 bp, Artificial sequence
  Synthetic oligonucleotide
gtaccaaaattccagctcca

SEQ ID NO: 3103 - DNA, 20 bp, Artificial sequence
  Synthetic oligonucleotide
caccttgtttactattactc

SEQ ID NO: 3104 - DNA, 20 bp, Artificial sequence
  Synthetic oligonucleotide
cacccttcactcattgtcta

SEQ ID NO: 3105 - DNA, 20 bp, Artificial sequence
  Synthetic oligonucleotide
acctaccgaactgatttcat

SEQ ID NO: 3106 - DNA, 20 bp, Artificial sequence
  Synthetic oligonucleotide
catgaaccagtcatcaaggc

SEQ ID NO: 3107 - DNA, 20 bp, Artificial sequence
  Synthetic oligonucleotide
atgacttccaacaaaggtgt

SEQ ID NO: 3108 - DNA, 20 bp, Artificial sequence
  Synthetic oligonucleotide
gcttacagccttcatctaca

SEQ ID NO: 3109 - DNA, 20 bp, Artificial sequence
  Synthetic oligonucleotide
tggaactagaagctccaact

SEQ ID NO: 3110 - DNA, 20 bp, Artificial sequence
  Synthetic oligonucleotide
tgtcaatcacagctacagat

SEQ ID NO: 3111 - DNA, 20 bp, Artificial sequence
  Synthetic oligonucleotide
gtagcaatctttcaatttcc

SEQ ID NO: 3112 - DNA, 20 bp, Artificial sequence
  Synthetic oligonucleotide
catacagccttccttggcta

SEQ ID NO: 3113 - DNA, 20 bp, Artificial sequence
  Synthetic oligonucleotide
aatggttcacagccaggcgc

SEQ ID NO: 3114 - DNA, 20 bp, Artificial sequence
  Synthetic oligonucleotide
atgctcagtcatccctcagt

SEQ ID NO: 3115 - DNA, 20 bp, Artificial sequence
  Synthetic oligonucleotide
gcctgtttagctcttgggtc

SEQ ID NO: 3116 - DNA, 20 bp, Artificial sequence
  Synthetic oligonucleotide
tgtaaagatttgcttctcca

SEQ ID NO: 3117 - DNA, 20 bp, Artificial sequence
  Synthetic oligonucleotide
attagctcacatcattggtt

SEQ ID NO: 3118 - DNA, 20 bp, Artificial sequence
  Synthetic oligonucleotide
tccattgttttacctatcac

SEQ ID NO: 3119 - DNA, 20 bp, Artificial sequence
  Synthetic oligonucleotide
atcctcctaaagtctcccta

SEQ ID NO: 3120 - DNA, 20 bp, Artificial sequence
  Synthetic oligonucleotide
aggtatcttgtcaccccttt

SEQ ID NO: 3121 - DNA, 20 bp, Artificial sequence
  Synthetic oligonucleotide
gttctttcaagtttacgctt

SEQ ID NO: 3122 - DNA, 20 bp, Artificial sequence
  Synthetic oligonucleotide
gcaccataatgtacctttca

SEQ ID NO: 3123 - DNA, 20 bp, Artificial sequence
  Synthetic oligonucleotide
agtgaccttttaaagttggc

SEQ ID NO: 3124 - DNA, 20 bp, Artificial sequence
  Synthetic oligonucleotide
tgacttgtatttgatgatcc

SEQ ID NO: 3125 - DNA, 20 bp, Artificial sequence
  Synthetic oligonucleotide
gctcacatcattggttatac

SEQ ID NO: 3126 - DNA, 20 bp, Artificial sequence
  Synthetic oligonucleotide
cccctttgccagctaggcaa

SEQ ID NO: 3127 - DNA, 20 bp, Artificial sequence
  Synthetic oligonucleotide
ccctaacatcctaagccaat

SEQ ID NO: 3128 - DNA, 20 bp, Artificial sequence
  Synthetic oligonucleotide
acgcaatggcctctacctca

SEQ ID NO: 3129 - DNA, 20 bp, Artificial sequence
  Synthetic oligonucleotide
gaggttattcttattcccca

SEQ ID NO: 3130 - DNA, 20 bp, Artificial sequence
  Synthetic oligonucleotide
gctggtttttaagttagctc

SEQ ID NO: 3131 - DNA, 20 bp, Artificial sequence
  Synthetic oligonucleotide
tctgtatccgctttttcctt

SEQ ID NO: 3132 - DNA, 20 bp, Artificial sequence
  Synthetic oligonucleotide
actcatctatagcagttaca

SEQ ID NO: 3133 - DNA, 20 bp, Artificial sequence
  Synthetic oligonucleotide
ttggttgtttgcatatatcc

SEQ ID NO: 3134 - DNA, 20 bp, Artificial sequence
  Synthetic oligonucleotide
gccctctttctacccagtcc

SEQ ID NO: 3135 - DNA, 20 bp, Artificial sequence
  Synthetic oligonucleotide
ttcacatgaattcatggtca

SEQ ID NO: 3136 - DNA, 20 bp, Artificial sequence
  Synthetic oligonucleotide
acatgtttatctatctatct

SEQ ID NO: 3137 - DNA, 20 bp, Artificial sequence
  Synthetic oligonucleotide
ggcaacctcccttctgtcct

SEQ ID NO: 3138 - DNA, 20 bp, Artificial sequence
  Synthetic oligonucleotide
ctgcatgtcaaaattgtatt

SEQ ID NO: 3139 - DNA, 20 bp, Artificial sequence
  Synthetic oligonucleotide
gggcttctctgcctagtcca

SEQ ID NO: 3140 - DNA, 20 bp, Artificial sequence
  Synthetic oligonucleotide
tgcaagcccactcatcatgc

SEQ ID NO: 3141 - DNA, 20 bp, Artificial sequence
  Synthetic oligonucleotide
ggacactttgactttgtgca

SEQ ID NO: 3142 - DNA, 20 bp, Artificial sequence
  Synthetic oligonucleotide
ctgcatacccctgcatacta

SEQ ID NO: 3143 - DNA, 20 bp, Artificial sequence
  Synthetic oligonucleotide
gctttaccactgtctgtcct

SEQ ID NO: 3144 - DNA, 20 bp, Artificial sequence
  Synthetic oligonucleotide
gccacaaattttgcctccaa

SEQ ID NO: 3145 - DNA, 20 bp, Artificial sequence
  Synthetic oligonucleotide
tgactggtctttaactctct

SEQ ID NO: 3146 - DNA, 20 bp, Artificial sequence
  Synthetic oligonucleotide
agcaatctttcaatttccgt

SEQ ID NO: 3147 - DNA, 20 bp, Artificial sequence
  Synthetic oligonucleotide
gccatatgaacttcctatgt

SEQ ID NO: 3148 - DNA, 20 bp, Artificial sequence
  Synthetic oligonucleotide
agctcttgatcaccatttct

SEQ ID NO: 3149 - DNA, 20 bp, Artificial sequence
  Synthetic oligonucleotide
cttgctttgaaccatcagac

SEQ ID NO: 3150 - DNA, 20 bp, Artificial sequence
  Synthetic oligonucleotide
gtctgctgagtataatatct

SEQ ID NO: 3151 - DNA, 20 bp, Artificial sequence
  Synthetic oligonucleotide
aagcacttcctcttaaccaa

SEQ ID NO: 3152 - DNA, 20 bp, Artificial sequence
  Synthetic oligonucleotide
ctgtcagcagacaaatgggt

SEQ ID NO: 3153 - DNA, 20 bp, Artificial sequence
  Synthetic oligonucleotide
ggctagttttacccattgca

SEQ ID NO: 3154 - DNA, 20 bp, Artificial sequence
  Synthetic oligonucleotide
ctgttagctcactcttcgca

SEQ ID NO: 3155 - DNA, 20 bp, Artificial sequence
  Synthetic oligonucleotide
gctcacttatcatgtggatt

SEQ ID NO: 3156 - DNA, 20 bp, Artificial sequence
  Synthetic oligonucleotide
tgtcatctgcaatactttcc

SEQ ID NO: 3157 - DNA, 20 bp, Artificial sequence
  Synthetic oligonucleotide
ccggtcttgattcaatgagc

SEQ ID NO: 3158 - DNA, 20 bp, Artificial sequence
  Synthetic oligonucleotide
ctaaacatatacatgtgcat

SEQ ID NO: 3159 - DNA, 20 bp, Artificial sequence
  Synthetic oligonucleotide
atggtatttctaaatgcact

SEQ ID NO: 3160 - DNA, 20 bp, Artificial sequence
  Synthetic oligonucleotide
tggcattgctgaccccaccc

SEQ ID NO: 3161 - DNA, 20 bp, Artificial sequence
  Synthetic oligonucleotide
ggccatctataacatgttgc

SEQ ID NO: 3162 - DNA, 20 bp, Artificial sequence
  Synthetic oligonucleotide
gcttggcatctatatctaaa

SEQ ID NO: 3163 - DNA, 20 bp, Artificial sequence
  Synthetic oligonucleotide
tcagcagattctctccaggt

SEQ ID NO: 3164 - DNA, 20 bp, Artificial sequence
  Synthetic oligonucleotide
ctgacattgccaccctgtgc

SEQ ID NO: 3165 - DNA, 20 bp, Artificial sequence
  Synthetic oligonucleotide
agcacacctaatcaagggtt

SEQ ID NO: 3166 - DNA, 20 bp, Artificial sequence
  Synthetic oligonucleotide
tccttggctatgccagtgct

SEQ ID NO: 3167 - DNA, 20 bp, Artificial sequence
  Synthetic oligonucleotide
tcttctacatccttagagct

SEQ ID NO: 3168 - DNA, 20 bp, Artificial sequence
  Synthetic oligonucleotide
gccacagagagctataccca

SEQ ID NO: 3169 - DNA, 20 bp, Artificial sequence
  Synthetic oligonucleotide
atggaccaagaccatctgga

SEQ ID NO: 3170 - DNA, 20 bp, Artificial sequence
  Synthetic oligonucleotide
ttccccttatgcttcaggca

SEQ ID NO: 3171 - DNA, 20 bp, Artificial sequence
  Synthetic oligonucleotide
cgaactgatttcatgatctt

SEQ ID NO: 3172 - DNA, 20 bp, Artificial sequence
  Synthetic oligonucleotide
gatcatgtgtcactctcttc

SEQ ID NO: 3173 - DNA, 20 bp, Artificial sequence
  Synthetic oligonucleotide
cccctttttttacaaagccc

SEQ ID NO: 3174 - DNA, 20 bp, Artificial sequence
  Synthetic oligonucleotide
gttcatcctctgacatgtct

SEQ ID NO: 3175 - DNA, 20 bp, Artificial sequence
  Synthetic oligonucleotide
tgaaccagtcatcaaggcta

SEQ ID NO: 3176 - DNA, 20 bp, Artificial sequence
  Synthetic oligonucleotide
gcaacttattgataacagta

SEQ ID NO: 3177 - DNA, 20 bp, Artificial sequence
  Synthetic oligonucleotide
agtctccctacattcctgac

SEQ ID NO: 3178 - DNA, 20 bp, Artificial sequence
  Synthetic oligonucleotide
gcactgccacaaagtctgct

SEQ ID NO: 3179 - DNA, 20 bp, Artificial sequence
  Synthetic oligonucleotide
atgatggttcatttcacaca

SEQ ID NO: 3180 - DNA, 20 bp, Artificial sequence
  Synthetic oligonucleotide
tgcacatgctctctctgaaa

SEQ ID NO: 3181 - DNA, 20 bp, Artificial sequence
  Synthetic oligonucleotide
gctccaactaaaagcaagga

SEQ ID NO: 3182 - DNA, 20 bp, Artificial sequence
  Synthetic oligonucleotide
aagtggtctgatcttagatc

SEQ ID NO: 3183 - DNA, 20 bp, Artificial sequence
  Synthetic oligonucleotide
gcctaatttaatatcacaga

SEQ ID NO: 3184 - DNA, 20 bp, Artificial sequence
  Synthetic oligonucleotide
ctgagggtcccttttcctca

SEQ ID NO: 3185 - DNA, 20 bp, Artificial sequence
  Synthetic oligonucleotide
accagcctacttctctcata

SEQ ID NO: 3186 - DNA, 20 bp, Artificial sequence
  Synthetic oligonucleotide
aggcacctttcttatggcag

SEQ ID NO: 3187 - DNA, 20 bp, Artificial sequence
  Synthetic oligonucleotide
tgccgctttctcactccacc

SEQ ID NO: 3188 - DNA, 20 bp, Artificial sequence
  Synthetic oligonucleotide
gaagcttcactcactaagca

SEQ ID NO: 3189 - DNA, 20 bp, Artificial sequence
  Synthetic oligonucleotide
atgactgcttttcctttagt

SEQ ID NO: 3190 - DNA, 20 bp, Artificial sequence
  Synthetic oligonucleotide
tatggctttatattgcacct

SEQ ID NO: 3191 - DNA, 20 bp, Artificial sequence
  Synthetic oligonucleotide
agctgctacacattttccac

SEQ ID NO: 3192 - DNA, 20 bp, Artificial sequence
  Synthetic oligonucleotide
cctctatcatgccatgcact

SEQ ID NO: 3193 - DNA, 20 bp, Artificial sequence
  Synthetic oligonucleotide
gatcaacaatctgttcatca

SEQ ID NO: 3194 - DNA, 20 bp, Artificial sequence
  Synthetic oligonucleotide
tggctatcaactcctcagtc

SEQ ID NO: 3195 - DNA, 20 bp, Artificial sequence
  Synthetic oligonucleotide
tctccatctcccttactgca

SEQ ID NO: 3196 - DNA, 20 bp, Artificial sequence
  Synthetic oligonucleotide
aacagctcttctgcactaca

SEQ ID NO: 3197 - DNA, 20 bp, Artificial sequence
  Synthetic oligonucleotide
agagaactgattccaccccc

SEQ ID NO: 3198 - DNA, 20 bp, Artificial sequence
  Synthetic oligonucleotide
gacatgctttcactccatgt

SEQ ID NO: 3199 - DNA, 20 bp, Artificial sequence
  Synthetic oligonucleotide
catgtttatctatctatcta

SEQ ID NO: 3200 - DNA, 20 bp, Artificial sequence
  Synthetic oligonucleotide
agagctgtctaacaccaaca

SEQ ID NO: 3201 - DNA, 20 bp, Artificial sequence
  Synthetic oligonucleotide
ctgatttcatgatcttaggt

SEQ ID NO: 3202 - DNA, 20 bp, Artificial sequence
  Synthetic oligonucleotide
cttcaggtattatcttgcat

SEQ ID NO: 3203 - DNA, 20 bp, Artificial sequence
  Synthetic oligonucleotide
ctccatctcccttactgcac

SEQ ID NO: 3204 - DNA, 20 bp, Artificial sequence
  Synthetic oligonucleotide
cctgcatactactgtagttt

SEQ ID NO: 3205 - DNA, 20 bp, Artificial sequence
  Synthetic oligonucleotide
gcaagcccactcatcatgca

SEQ ID NO: 3206 - DNA, 20 bp, Artificial sequence
  Synthetic oligonucleotide
gcaaactatccataggttac

SEQ ID NO: 3207 - DNA, 20 bp, Artificial sequence
  Synthetic oligonucleotide
gttgtttgcatatatccttt

SEQ ID NO: 3208 - DNA, 20 bp, Artificial sequence
  Synthetic oligonucleotide
tctacatccttagagctttc

SEQ ID NO: 3209 - DNA, 20 bp, Artificial sequence
  Synthetic oligonucleotide
tgactgcttttcctttagtc

SEQ ID NO: 3210 - DNA, 20 bp, Artificial sequence
  Synthetic oligonucleotide
gaaccagtcatcaaggctac

SEQ ID NO: 3211 - DNA, 20 bp, Artificial sequence
  Synthetic oligonucleotide
atcctaagccaataatagca

SEQ ID NO: 3212 - DNA, 20 bp, Artificial sequence
  Synthetic oligonucleotide
tggtcatatgattatcaacc

SEQ ID NO: 3213 - DNA, 20 bp, Artificial sequence
  Synthetic oligonucleotide
actcatccttcagataggca

SEQ ID NO: 3214 - DNA, 20 bp, Artificial sequence
  Synthetic oligonucleotide
gggcaactcatcctctaaca

SEQ ID NO: 3215 - DNA, 20 bp, Artificial sequence
  Synthetic oligonucleotide
aagacagtcatctcggtctc

SEQ ID NO: 3216 - DNA, 20 bp, Artificial sequence
  Synthetic oligonucleotide
gcattgctgaccccacccta

SEQ ID NO: 3217 - DNA, 20 bp, Artificial sequence
  Synthetic oligonucleotide
cagcacctttttcactccag

SEQ ID NO: 3218 - DNA, 20 bp, Artificial sequence
  Synthetic oligonucleotide
tggcacccacattgcaactt

SEQ ID NO: 3219 - DNA, 20 bp, Artificial sequence
  Synthetic oligonucleotide
gcacacctaatcaagggttc

SEQ ID NO: 3220 - DNA, 20 bp, Artificial sequence
  Synthetic oligonucleotide
gagcaacacatgctctgctt

SEQ ID NO: 3221 - DNA, 20 bp, Artificial sequence
  Synthetic oligonucleotide
acagctcttctgcactacat

SEQ ID NO: 3222 - DNA, 20 bp, Artificial sequence
  Synthetic oligonucleotide
atgcaaatatctcattctgc

SEQ ID NO: 3223 - DNA, 20 bp, Artificial sequence
  Synthetic oligonucleotide
tggcaaggtccctaccttgc

SEQ ID NO: 3224 - DNA, 20 bp, Artificial sequence
  Synthetic oligonucleotide
gttcatttcacacagtactt

SEQ ID NO: 3225 - DNA, 20 bp, Artificial sequence
  Synthetic oligonucleotide
gcagggccattcctctgtca

SEQ ID NO: 3226 - DNA, 20 bp, Artificial sequence
  Synthetic oligonucleotide
gcatctgactttgagaacgc

SEQ ID NO: 3227 - DNA, 20 bp, Artificial sequence
  Synthetic oligonucleotide
gttggacttcagtcataaca

SEQ ID NO: 3228 - DNA, 20 bp, Artificial sequence
  Synthetic oligonucleotide
gttagctcactcttcgcaac

SEQ ID NO: 3229 - DNA, 20 bp, Artificial sequence
  Synthetic oligonucleotide
ccagcctacttctctcataa

SEQ ID NO: 3230 - DNA, 20 bp, Artificial sequence
  Synthetic oligonucleotide
ctgcatttataaatgaccgt

SEQ ID NO: 3231 - DNA, 20 bp, Artificial sequence
  Synthetic oligonucleotide
gccatctataacatgttgct

SEQ ID NO: 3232 - DNA, 20 bp, Artificial sequence
  Synthetic oligonucleotide
gggtcttcaaagccagctcc

SEQ ID NO: 3233 - DNA, 20 bp, Artificial sequence
  Synthetic oligonucleotide
ctgctttttcaacactgtac

SEQ ID NO: 3234 - DNA, 20 bp, Artificial sequence
  Synthetic oligonucleotide
gacccatctcaaatctacct

SEQ ID NO: 3235 - DNA, 20 bp, Artificial sequence
  Synthetic oligonucleotide
gctcttgatcaccatttctc

SEQ ID NO: 3236 - DNA, 20 bp, Artificial sequence
  Synthetic oligonucleotide
atgcattccacttttgaggt

SEQ ID NO: 3237 - DNA, 20 bp, Artificial sequence
  Synthetic oligonucleotide
tttggctgatagcctgggct

SEQ ID NO: 3238 - DNA, 20 bp, Artificial sequence
  Synthetic oligonucleotide
gctccattgcttcatttgct

SEQ ID NO: 3239 - DNA, 20 bp, Artificial sequence
  Synthetic oligonucleotide
cagcaggtactatttcaggc

SEQ ID NO: 3240 - DNA, 20 bp, Artificial sequence
  Synthetic oligonucleotide
agtggtctgatcttagatcc

SEQ ID NO: 3241 - DNA, 20 bp, Artificial sequence
  Synthetic oligonucleotide
ccttggctatgccagtgctc

SEQ ID NO: 3242 - DNA, 20 bp, Artificial sequence
  Synthetic oligonucleotide
cagcagattctctccaggta

SEQ ID NO: 3243 - DNA, 20 bp, Artificial sequence
  Synthetic oligonucleotide
gccgctttctcactccaccg

SEQ ID NO: 3244 - DNA, 20 bp, Artificial sequence
  Synthetic oligonucleotide
gtgtcactctcttcctccta

SEQ ID NO: 3245 - DNA, 20 bp, Artificial sequence
  Synthetic oligonucleotide
ggttattcttattccccaac

SEQ ID NO: 3246 - DNA, 20 bp, Artificial sequence
  Synthetic oligonucleotide
tctcaagttcaacatgggct

SEQ ID NO: 3247 - DNA, 20 bp, Artificial sequence
  Synthetic oligonucleotide
catgtatatttatctaaaca

SEQ ID NO: 3248 - DNA, 20 bp, Artificial sequence
  Synthetic oligonucleotide
tcccctgcatgtcttcactt

SEQ ID NO: 3249 - DNA, 20 bp, Artificial sequence
  Synthetic oligonucleotide
ggaccaagaccatctggatc

SEQ ID NO: 3250 - DNA, 20 bp, Artificial sequence
  Synthetic oligonucleotide
attttggcagaactgcaaat

SEQ ID NO: 3251 - DNA, 20 bp, Artificial sequence
  Synthetic oligonucleotide
gtagcatgcctcaagaccca

SEQ ID NO: 3252 - DNA, 20 bp, Artificial sequence
  Synthetic oligonucleotide
tcatggtaactccatcagcc

SEQ ID NO: 3253 - DNA, 20 bp, Artificial sequence
  Synthetic oligonucleotide
atgataaaaataaaatgaat

SEQ ID NO: 3254 - DNA, 20 bp, Artificial sequence
  Synthetic oligonucleotide
gttctttcacatctagtatc

SEQ ID NO: 3255 - DNA, 20 bp, Artificial sequence
  Synthetic oligonucleotide
ctgtatccgctttttccttt

SEQ ID NO: 3256 - DNA, 20 bp, Artificial sequence
  Synthetic oligonucleotide
tcccaatcgccatttctcgc

SEQ ID NO: 3257 - DNA, 20 bp, Artificial sequence
  Synthetic oligonucleotide
acagctgtatatacttccct

SEQ ID NO: 3258 - DNA, 20 bp, Artificial sequence
  Synthetic oligonucleotide
aggtatagtacctaatggct

SEQ ID NO: 3259 - DNA, 20 bp, Artificial sequence
  Synthetic oligonucleotide
ggctatcaactcctcagtct

SEQ ID NO: 3260 - DNA, 20 bp, Artificial sequence
  Synthetic oligonucleotide
atcctatacacatctccacg

SEQ ID NO: 3261 - DNA, 20 bp, Artificial sequence
  Synthetic oligonucleotide
cccattgcagtcattcacta

SEQ ID NO: 3262 - DNA, 20 bp, Artificial sequence
  Synthetic oligonucleotide
agcctatcttctctgctata

SEQ ID NO: 3263 - DNA, 20 bp, Artificial sequence
  Synthetic oligonucleotide
gtcaatatacagtctacttc

SEQ ID NO: 3264 - DNA, 20 bp, Artificial sequence
  Synthetic oligonucleotide
agtcatggtcaaattgcacc

SEQ ID NO: 3265 - DNA, 20 bp, Artificial sequence
  Synthetic oligonucleotide
gggtcccttttcctcactca

SEQ ID NO: 3266 - DNA, 20 bp, Artificial sequence
  Synthetic oligonucleotide
cggtcttgattcaatgagcc

SEQ ID NO: 3267 - DNA, 20 bp, Artificial sequence
  Synthetic oligonucleotide
ccaccttcccacctaattta

SEQ ID NO: 3268 - DNA, 20 bp, Artificial sequence
  Synthetic oligonucleotide
tctgcaatactttccctaag

SEQ ID NO: 3269 - DNA, 20 bp, Artificial sequence
  Synthetic oligonucleotide
aagacatcataagttgtcac

SEQ ID NO: 3270 - DNA, 20 bp, Artificial sequence
  Synthetic oligonucleotide
ttgccagtcaactagtgcta

SEQ ID NO: 3271 - DNA, 20 bp, Artificial sequence
  Synthetic oligonucleotide
gtgacaaattataactacac

SEQ ID NO: 3272 - DNA, 20 bp, Artificial sequence
  Synthetic oligonucleotide
gtgtcttcaagcctatgacc

SEQ ID NO: 3273 - DNA, 20 bp, Artificial sequence
  Synthetic oligonucleotide
atcatcttcaaagtctggat

SEQ ID NO: 3274 - DNA, 20 bp, Artificial sequence
  Synthetic oligonucleotide
agcacctatttccattagaa

SEQ ID NO: 3275 - DNA, 20 bp, Artificial sequence
  Synthetic oligonucleotide
gctctttttcacatattgta

SEQ ID NO: 3276 - DNA, 20 bp, Artificial sequence
  Synthetic oligonucleotide
agctcttctgcactacattc

SEQ ID NO: 3277 - DNA, 20 bp, Artificial sequence
  Synthetic oligonucleotide
agtcattcactaatcagagc

SEQ ID NO: 3278 - DNA, 20 bp, Artificial sequence
  Synthetic oligonucleotide
catgctttcactccatgtgt

SEQ ID NO: 3279 - DNA, 20 bp, Artificial sequence
  Synthetic oligonucleotide
gctgtctaacaccaacagga

SEQ ID NO: 3280 - DNA, 20 bp, Artificial sequence
  Synthetic oligonucleotide
ttggacttcagtcataacac

SEQ ID NO: 3281 - DNA, 20 bp, Artificial sequence
  Synthetic oligonucleotide
gaggatatatactccaccaa

SEQ ID NO: 3282 - DNA, 20 bp, Artificial sequence
  Synthetic oligonucleotide
gcacctttttcactccaggg

SEQ ID NO: 3283 - DNA, 20 bp, Artificial sequence
  Synthetic oligonucleotide
gcagattctctccaggtatt

SEQ ID NO: 3284 - DNA, 20 bp, Artificial sequence
  Synthetic oligonucleotide
gcacccacattgcaacttca

SEQ ID NO: 3285 - DNA, 20 bp, Artificial sequence
  Synthetic oligonucleotide
gctgaccccaccctaatggt

SEQ ID NO: 3286 - DNA, 20 bp, Artificial sequence
  Synthetic oligonucleotide
ccgctttctcactccaccgt

SEQ ID NO: 3287 - DNA, 20 bp, Artificial sequence
  Synthetic oligonucleotide
gctcataaagctcctagcat

SEQ ID NO: 3288 - DNA, 20 bp, Artificial sequence
  Synthetic oligonucleotide
atgtctgccaatctgcaggc

SEQ ID NO: 3289 - DNA, 20 bp, Artificial sequence
  Synthetic oligonucleotide
gcctacttctctcataaggt

SEQ ID NO: 3290 - DNA, 20 bp, Artificial sequence
  Synthetic oligonucleotide
ggtcttgattcaatgagcct

SEQ ID NO: 3291 - DNA, 20 bp, Artificial sequence
  Synthetic oligonucleotide
tatgtatatttatctaaaca

SEQ ID NO: 3292 - DNA, 20 bp, Artificial sequence
  Synthetic oligonucleotide
gtatccgctttttcctttag

SEQ ID NO: 3293 - DNA, 20 bp, Artificial sequence
  Synthetic oligonucleotide
gcttgcctgccacagaggat

SEQ ID NO: 3294 - DNA, 20 bp, Artificial sequence
  Synthetic oligonucleotide
tccatctcccttactgcact

SEQ ID NO: 3295 - DNA, 20 bp, Artificial sequence
  Synthetic oligonucleotide
ggtgatactctaattcttgt

SEQ ID NO: 3296 - DNA, 20 bp, Artificial sequence
  Synthetic oligonucleotide
ggcaaggtccctaccttgct

SEQ ID NO: 3297 - DNA, 20 bp, Artificial sequence
  Synthetic oligonucleotide
gtcccttcaaatcacaatct

SEQ ID NO: 3298 - DNA, 20 bp, Artificial sequence
  Synthetic oligonucleotide
gcctagtcttactttttctt

SEQ ID NO: 3299 - DNA, 20 bp, Artificial sequence
  Synthetic oligonucleotide
catgggtctcattttcacct

SEQ ID NO: 3300 - DNA, 20 bp, Artificial sequence
  Synthetic oligonucleotide
ggaacatccttaattctagc

SEQ ID NO: 3301 - DNA, 20 bp, Artificial sequence
  Synthetic oligonucleotide
ccattcctctgtcaacataa

SEQ ID NO: 3302 - DNA, 20 bp, Artificial sequence
  Synthetic oligonucleotide
ccttgtctttaaatgagtcc

SEQ ID NO: 3303 - DNA, 20 bp, Artificial sequence
  Synthetic oligonucleotide
gcctatcttctctgctatac

SEQ ID NO: 3304 - DNA, 20 bp, Artificial sequence
  Synthetic oligonucleotide
acatccttagagctttccct

SEQ ID NO: 3305 - DNA, 20 bp, Artificial sequence
  Synthetic oligonucleotide
ccccaatccacactgttagc

SEQ ID NO: 3306 - DNA, 20 bp, Artificial sequence
  Synthetic oligonucleotide
atagcttgcattaccttggc

SEQ ID NO: 3307 - DNA, 20 bp, Artificial sequence
  Synthetic oligonucleotide
gttattcttattccccaaca

SEQ ID NO: 3308 - DNA, 20 bp, Artificial sequence
  Synthetic oligonucleotide
gctatgccagtgctcaggaa

SEQ ID NO: 3309 - DNA, 20 bp, Artificial sequence
  Synthetic oligonucleotide
gactgcttttcctttagtct

SEQ ID NO: 3310 - DNA, 20 bp, Artificial sequence
  Synthetic oligonucleotide
agggttatatctaccagcat

SEQ ID NO: 3311 - DNA, 20 bp, Artificial sequence
  Synthetic oligonucleotide
agcccactcatcatgcattc

SEQ ID NO: 3312 - DNA, 20 bp, Artificial sequence
  Synthetic oligonucleotide
tgcaatactttccctaagtt

SEQ ID NO: 3313 - DNA, 20 bp, Artificial sequence
  Synthetic oligonucleotide
acccatctcaaatctacctt

SEQ ID NO: 3314 - DNA, 20 bp, Artificial sequence
  Synthetic oligonucleotide
ggtcatatgattatcaacca

SEQ ID NO: 3315 - DNA, 20 bp, Artificial sequence
  Synthetic oligonucleotide
aagggttcaccttaatgcct

SEQ ID NO: 3316 - DNA, 20 bp, Artificial sequence
  Synthetic oligonucleotide
aactgcaaatctctcctgca

SEQ ID NO: 3317 - DNA, 20 bp, Artificial sequence
  Synthetic oligonucleotide
gagctagttttccaactcaa

SEQ ID NO: 3318 - DNA, 20 bp, Artificial sequence
  Synthetic oligonucleotide
accatttctcatattaccat

SEQ ID NO: 3319 - DNA, 20 bp, Artificial sequence
  Synthetic oligonucleotide
acatcttgcatatagccttc

SEQ ID NO: 3320 - DNA, 20 bp, Artificial sequence
  Synthetic oligonucleotide
gaccaagaccatctggatct

SEQ ID NO: 3321 - DNA, 20 bp, Artificial sequence
  Synthetic oligonucleotide
tttatctatctatctaaaca

SEQ ID NO: 3322 - DNA, 20 bp, Artificial sequence
  Synthetic oligonucleotide
ccatctataacatgttgcta

SEQ ID NO: 3323 - DNA, 20 bp, Artificial sequence
  Synthetic oligonucleotide
gtcttagatcaactggatta

SEQ ID NO: 3324 - DNA, 20 bp, Artificial sequence
  Synthetic oligonucleotide
tagagactttctccccagct

SEQ ID NO: 3325 - DNA, 20 bp, Artificial sequence
  Synthetic oligonucleotide
gttggtatctaaccagttac

SEQ ID NO: 3326 - DNA, 20 bp, Artificial sequence
  Synthetic oligonucleotide
tcaggtattatcttgcattt

SEQ ID NO: 3327 - DNA, 20 bp, Artificial sequence
  Synthetic oligonucleotide
ggcaactcatcctctaacat

SEQ ID NO: 3328 - DNA, 20 bp, Artificial sequence
  Synthetic oligonucleotide
cacacagtacttctgccctt

SEQ ID NO: 3329 - DNA, 20 bp, Artificial sequence
  Synthetic oligonucleotide
ctgccatcctctgctaagga

SEQ ID NO: 3330 - DNA, 20 bp, Artificial sequence
  Synthetic oligonucleotide
ccctgttttcctctatggca

SEQ ID NO: 3331 - DNA, 20 bp, Artificial sequence
  Synthetic oligonucleotide
tgtgatgtcaacacatgggc

SEQ ID NO: 3332 - DNA, 20 bp, Artificial sequence
  Synthetic oligonucleotide
acagtctacttcgctgaagc

SEQ ID NO: 3333 - DNA, 20 bp, Artificial sequence
  Synthetic oligonucleotide
tcctcttttaagcatctacc

SEQ ID NO: 3334 - DNA, 20 bp, Artificial sequence
  Synthetic oligonucleotide
ggcaaaaccactttgagcaa

SEQ ID NO: 3335 - DNA, 20 bp, Artificial sequence
  Synthetic oligonucleotide
gtggtctgatcttagatcca

SEQ ID NO: 3336 - DNA, 20 bp, Artificial sequence
  Synthetic oligonucleotide
ctacacatccctaccttgtc

SEQ ID NO: 3337 - DNA, 20 bp, Artificial sequence
  Synthetic oligonucleotide
agtatcattttcttagtgtc

SEQ ID NO: 3338 - DNA, 20 bp, Artificial sequence
  Synthetic oligonucleotide
ctggtaccacggataggtca

SEQ ID NO: 3339 - DNA, 20 bp, Artificial sequence
  Synthetic oligonucleotide
tgcagatatattacaactgt

SEQ ID NO: 3340 - DNA, 20 bp, Artificial sequence
  Synthetic oligonucleotide
tagctcactcttcgcaactc

SEQ ID NO: 3341 - DNA, 20 bp, Artificial sequence
  Synthetic oligonucleotide
tgcacattgaaaattcttac

SEQ ID NO: 3342 - DNA, 20 bp, Artificial sequence
  Synthetic oligonucleotide
ctccattgcttcatttgcta

SEQ ID NO: 3343 - DNA, 20 bp, Artificial sequence
  Synthetic oligonucleotide
ttcctcctactctaagttcc

SEQ ID NO: 3344 - DNA, 20 bp, Artificial sequence
  Synthetic oligonucleotide
gagtacgatttcacatgttt

SEQ ID NO: 3345 - DNA, 20 bp, Artificial sequence
  Synthetic oligonucleotide
tcggtctctcagtcattaca

SEQ ID NO: 3346 - DNA, 20 bp, Artificial sequence
  Synthetic oligonucleotide
tcccacctaatttaggcacc

SEQ ID NO: 3347 - DNA, 20 bp, Artificial sequence
  Synthetic oligonucleotide
gtatctgacatgactgccta

SEQ ID NO: 3348 - DNA, 20 bp, Artificial sequence
  Synthetic oligonucleotide
ctggttctcattcagacatt

SEQ ID NO: 3349 - DNA, 20 bp, Artificial sequence
  Synthetic oligonucleotide
cctgtatggatcatttgtcc

SEQ ID NO: 3350 - DNA, 20 bp, Artificial sequence
  Synthetic oligonucleotide
gttttctacacttagccagt

SEQ ID NO: 3351 - DNA, 20 bp, Artificial sequence
  Synthetic oligonucleotide
tagcaacttttcctggtcta

SEQ ID NO: 3352 - DNA, 20 bp, Artificial sequence
  Synthetic oligonucleotide
gctcttctgcactacattct

SEQ ID NO: 3353 - DNA, 20 bp, Artificial sequence
  Synthetic oligonucleotide
ttattcttattccccaacat

SEQ ID NO: 3354 - DNA, 20 bp, Artificial sequence
  Synthetic oligonucleotide
ttatctatctatctaaacat

SEQ ID NO: 3355 - DNA, 20 bp, Artificial sequence
  Synthetic oligonucleotide
gcaatctctcatattcttct

SEQ ID NO: 3356 - DNA, 20 bp, Artificial sequence
  Synthetic oligonucleotide
gcagctctccttacaagttt

SEQ ID NO: 3357 - DNA, 20 bp, Artificial sequence
  Synthetic oligonucleotide
cccacctaatttaggcacca

SEQ ID NO: 3358 - DNA, 20 bp, Artificial sequence
  Synthetic oligonucleotide
tcctcctactctaagttcca

SEQ ID NO: 3359 - DNA, 20 bp, Artificial sequence
  Synthetic oligonucleotide
agggttcaccttaatgcctc

SEQ ID NO: 3360 - DNA, 20 bp, Artificial sequence
  Synthetic oligonucleotide
tggttctcattcagacatta

SEQ ID NO: 3361 - DNA, 20 bp, Artificial sequence
  Synthetic oligonucleotide
atgtatatttatctaaacat

SEQ ID NO: 3362 - DNA, 20 bp, Artificial sequence
  Synthetic oligonucleotide
ccaacaggaatgctaactct

SEQ ID NO: 3363 - DNA, 20 bp, Artificial sequence
  Synthetic oligonucleotide
tggacttcagtcataacaca

SEQ ID NO: 3364 - DNA, 20 bp, Artificial sequence
  Synthetic oligonucleotide
atccctaccttgtcctggtt

SEQ ID NO: 3365 - DNA, 20 bp, Artificial sequence
  Synthetic oligonucleotide
agccttcattgacttgtcat

SEQ ID NO: 3366 - DNA, 20 bp, Artificial sequence
  Synthetic oligonucleotide
gcacattgaaaattcttacc

SEQ ID NO: 3367 - DNA, 20 bp, Artificial sequence
  Synthetic oligonucleotide
gggttatatctaccagcatc

SEQ ID NO: 3368 - DNA, 20 bp, Artificial sequence
  Synthetic oligonucleotide
gtctgatcttagatccagta

SEQ ID NO: 3369 - DNA, 20 bp, Artificial sequence
  Synthetic oligonucleotide
tcttggctactcctggccct

SEQ ID NO: 3370 - DNA, 20 bp, Artificial sequence
  Synthetic oligonucleotide
tccctacacaaagactatcc

SEQ ID NO: 3371 - DNA, 20 bp, Artificial sequence
  Synthetic oligonucleotide
ggtctctcagtcattacaca

SEQ ID NO: 3372 - DNA, 20 bp, Artificial sequence
  Synthetic oligonucleotide
caagacttgttcatcactac

SEQ ID NO: 3373 - DNA, 20 bp, Artificial sequence
  Synthetic oligonucleotide
gcccactcatcatgcattct

SEQ ID NO: 3374 - DNA, 20 bp, Artificial sequence
  Synthetic oligonucleotide
ccagagatacatgattcggc

SEQ ID NO: 3375 - DNA, 20 bp, Artificial sequence
  Synthetic oligonucleotide
gatcaactggattatcagct

SEQ ID NO: 3376 - DNA, 20 bp, Artificial sequence
  Synthetic oligonucleotide
atgctttcactccatgtgtt

SEQ ID NO: 3377 - DNA, 20 bp, Artificial sequence
  Synthetic oligonucleotide
tgctactctctccatatgcc

SEQ ID NO: 3378 - DNA, 20 bp, Artificial sequence
  Synthetic oligonucleotide
atctggatctctccatagca

SEQ ID NO: 3379 - DNA, 20 bp, Artificial sequence
  Synthetic oligonucleotide
gccagtctattgctcagttc

SEQ ID NO: 3380 - DNA, 20 bp, Artificial sequence
  Synthetic oligonucleotide
gctttctcactccaccgttt

SEQ ID NO: 3381 - DNA, 20 bp, Artificial sequence
  Synthetic oligonucleotide
actttgagcaaagcatgcca

SEQ ID NO: 3382 - DNA, 20 bp, Artificial sequence
  Synthetic oligonucleotide
ttgcgactatcagcacagct

SEQ ID NO: 3383 - DNA, 20 bp, Artificial sequence
  Synthetic oligonucleotide
cagtacttctgccctttgca

SEQ ID NO: 3384 - DNA, 20 bp, Artificial sequence
  Synthetic oligonucleotide
gcaggttgttctcaagtttc

SEQ ID NO: 3385 - DNA, 20 bp, Artificial sequence
  Synthetic oligonucleotide
tggttcaccctgtctaccac

SEQ ID NO: 3386 - DNA, 20 bp, Artificial sequence
  Synthetic oligonucleotide
gttctttagtccattcagtc

SEQ ID NO: 3387 - DNA, 20 bp, Artificial sequence
  Synthetic oligonucleotide
tcctttagtctcacctcatc

SEQ ID NO: 3388 - DNA, 20 bp, Artificial sequence
  Synthetic oligonucleotide
cccaatccacactgttagcc

SEQ ID NO: 3389 - DNA, 20 bp, Artificial sequence
  Synthetic oligonucleotide
tggtccctcactgactgtca

SEQ ID NO: 3390 - DNA, 20 bp, Artificial sequence
  Synthetic oligonucleotide
gtctattcacctcaccatcc

SEQ ID NO: 3391 - DNA, 20 bp, Artificial sequence
  Synthetic oligonucleotide
gtctgatcaatttcatgtct

SEQ ID NO: 3392 - DNA, 20 bp, Artificial sequence
  Synthetic oligonucleotide
gaccatggctaccttcttga

SEQ ID NO: 3393 - DNA, 20 bp, Artificial sequence
  Synthetic oligonucleotide
cggagtctttccaacaaggc

SEQ ID NO: 3394 - DNA, 20 bp, Artificial sequence
  Synthetic oligonucleotide
tgtctcttcttcctttggac

SEQ ID NO: 3395 - DNA, 20 bp, Artificial sequence
  Synthetic oligonucleotide
tagcttgcattaccttggct

SEQ ID NO: 3396 - DNA, 20 bp, Artificial sequence
  Synthetic oligonucleotide
cctcatctacctctgatgcc

SEQ ID NO: 3397 - DNA, 20 bp, Artificial sequence
  Synthetic oligonucleotide
ccaggaccaagtcactgcaa

SEQ ID NO: 3398 - DNA, 20 bp, Artificial sequence
  Synthetic oligonucleotide
gtgatactctaattcttgtc

SEQ ID NO: 3399 - DNA, 20 bp, Artificial sequence
  Synthetic oligonucleotide
tttttccagagactttgaaa

SEQ ID NO: 3400 - DNA, 20 bp, Artificial sequence
  Synthetic oligonucleotide
agctcactcttcgcaactct

SEQ ID NO: 3401 - DNA, 20 bp, Artificial sequence
  Synthetic oligonucleotide
gttggccaagtctttacttc

SEQ ID NO: 3402 - DNA, 20 bp, Artificial sequence
  Synthetic oligonucleotide
cgtggccttcagcaacttta

SEQ ID NO: 3403 - DNA, 20 bp, Artificial sequence
  Synthetic oligonucleotide
gctcaggaagctctcatttc

SEQ ID NO: 3404 - DNA, 20 bp, Artificial sequence
  Synthetic oligonucleotide
ttcaactgtcccatctaggc

SEQ ID NO: 3405 - DNA, 20 bp, Artificial sequence
  Synthetic oligonucleotide
atgcatctctagtcctgact

SEQ ID NO: 3406 - DNA, 20 bp, Artificial sequence
  Synthetic oligonucleotide
ggtgatgcactgctttacac

SEQ ID NO: 3407 - DNA, 20 bp, Artificial sequence
  Synthetic oligonucleotide
cataagtccttcaccagcta

SEQ ID NO: 3408 - DNA, 20 bp, Artificial sequence
  Synthetic oligonucleotide
tgtcaacataagactctgca

SEQ ID NO: 3409 - DNA, 20 bp, Artificial sequence
  Synthetic oligonucleotide
gaacatccttaattctagcc

SEQ ID NO: 3410 - DNA, 20 bp, Artificial sequence
  Synthetic oligonucleotide
acaacctatttgctgcacaa

SEQ ID NO: 3411 - DNA, 20 bp, Artificial sequence
  Synthetic oligonucleotide
ctgaccccaccctaatggtc

SEQ ID NO: 3412 - DNA, 20 bp, Artificial sequence
  Synthetic oligonucleotide
tggacatacttcaagtgctt

SEQ ID NO: 3413 - DNA, 20 bp, Artificial sequence
  Synthetic oligonucleotide
atgaggtgttccaccatgtc

SEQ ID NO: 3414 - DNA, 20 bp, Artificial sequence
  Synthetic oligonucleotide
acccacgcaggtcaccctca

SEQ ID NO: 3415 - DNA, 20 bp, Artificial sequence
  Synthetic oligonucleotide
catcaattcatgatctgggt

SEQ ID NO: 3416 - DNA, 20 bp, Artificial sequence
  Synthetic oligonucleotide
agggtactaatgtacccagc

SEQ ID NO: 3417 - DNA, 20 bp, Artificial sequence
  Synthetic oligonucleotide
caggattcgccattccagcc

SEQ ID NO: 3418 - DNA, 20 bp, Artificial sequence
  Synthetic oligonucleotide
ctgagttatctttttaccat

SEQ ID NO: 3419 - DNA, 20 bp, Artificial sequence
  Synthetic oligonucleotide
gcactgtacaaatagtagtt

SEQ ID NO: 3420 - DNA, 20 bp, Artificial sequence
  Synthetic oligonucleotide
tctgctatacaacaagctct

SEQ ID NO: 3421 - DNA, 20 bp, Artificial sequence
  Synthetic oligonucleotide
ctcatcctctaacatagcta

SEQ ID NO: 3422 - DNA, 20 bp, Artificial sequence
  Synthetic oligonucleotide
ctggcatgtatacattatct

SEQ ID NO: 3423 - DNA, 20 bp, Artificial sequence
  Synthetic oligonucleotide
ctgctaattttcacagctta

SEQ ID NO: 3424 - DNA, 20 bp, Artificial sequence
  Synthetic oligonucleotide
gagtccttacttccgctgtt

SEQ ID NO: 3425 - DNA, 20 bp, Artificial sequence
  Synthetic oligonucleotide
ccatctcccttactgcactt

SEQ ID NO: 3426 - DNA, 20 bp, Artificial sequence
  Synthetic oligonucleotide
gagtccacactgtttgaccc

SEQ ID NO: 3427 - DNA, 20 bp, Artificial sequence
  Synthetic oligonucleotide
aggcatgtataaaactgttc

SEQ ID NO: 3428 - DNA, 20 bp, Artificial sequence
  Synthetic oligonucleotide
gcaatactttccctaagttt

SEQ ID NO: 3429 - DNA, 20 bp, Artificial sequence
  Synthetic oligonucleotide
ttggcttaatatactgttca

SEQ ID NO: 3430 - DNA, 20 bp, Artificial sequence
  Synthetic oligonucleotide
tggtcctcagacatttcttt

SEQ ID NO: 3431 - DNA, 20 bp, Artificial sequence
  Synthetic oligonucleotide
cttcaagtgcttttaaaaat

SEQ ID NO: 3432 - DNA, 20 bp, Artificial sequence
  Synthetic oligonucleotide
ggttaatgctgattttctcc

SEQ ID NO: 3433 - DNA, 20 bp, Artificial sequence
  Synthetic oligonucleotide
tccacctagctctttaattc

SEQ ID NO: 3434 - DNA, 20 bp, Artificial sequence
  Synthetic oligonucleotide
cgtcgactctagaacggtgc

SEQ ID NO: 3435 - DNA, 20 bp, Artificial sequence
  Synthetic oligonucleotide
tcctactctaagttccagtc

SEQ ID NO: 3436 - DNA, 20 bp, Artificial sequence
  Synthetic oligonucleotide
gctgcatccttataaactgc

SEQ ID NO: 3437 - DNA, 20 bp, Artificial sequence
  Synthetic oligonucleotide
agcttgcattaccttggcta

SEQ ID NO: 3438 - DNA, 20 bp, Artificial sequence
  Synthetic oligonucleotide
tcttctgcactacattctgt

SEQ ID NO: 3439 - DNA, 20 bp, Artificial sequence
  Synthetic oligonucleotide
tatctatctatctaaacata

SEQ ID NO: 3440 - DNA, 20 bp, Artificial sequence
  Synthetic oligonucleotide
gctgcagcagtcaattcact

SEQ ID NO: 3441 - DNA, 20 bp, Artificial sequence
  Synthetic oligonucleotide
agcaaagcatgccaacagat

SEQ ID NO: 3442 - DNA, 20 bp, Artificial sequence
  Synthetic oligonucleotide
ggagtctttccaacaaggca

SEQ ID NO: 3443 - DNA, 20 bp, Artificial sequence
  Synthetic oligonucleotide
gctactctctccatatgcca

SEQ ID NO: 3444 - DNA, 20 bp, Artificial sequence
  Synthetic oligonucleotide
tcaactgtcccatctaggca

SEQ ID NO: 3445 - DNA, 20 bp, Artificial sequence
  Synthetic oligonucleotide
gtagttatcactcaaagtaa

SEQ ID NO: 3446 - DNA, 20 bp, Artificial sequence
  Synthetic oligonucleotide
tcaggaagctctcatttctt

SEQ ID NO: 3447 - DNA, 20 bp, Artificial sequence
  Synthetic oligonucleotide
tctggatctctccatagcat

SEQ ID NO: 3448 - DNA, 20 bp, Artificial sequence
  Synthetic oligonucleotide
tctcagtcattacacagggc

SEQ ID NO: 3449 - DNA, 20 bp, Artificial sequence
  Synthetic oligonucleotide
cctttagtctcacctcatct

SEQ ID NO: 3450 - DNA, 20 bp, Artificial sequence
  Synthetic oligonucleotide
gtcatatatacctagcacaa

SEQ ID NO: 3451 - DNA, 20 bp, Artificial sequence
  Synthetic oligonucleotide
gctcactcttcgcaactctc

SEQ ID NO: 3452 - DNA, 20 bp, Artificial sequence
  Synthetic oligonucleotide
ggctaccactatattttata

SEQ ID NO: 3453 - DNA, 20 bp, Artificial sequence
  Synthetic oligonucleotide
cctacacaaagactatccaa

SEQ ID NO: 3454 - DNA, 20 bp, Artificial sequence
  Synthetic oligonucleotide
ggtacttttttcacttatct

SEQ ID NO: 3455 - DNA, 20 bp, Artificial sequence
  Synthetic oligonucleotide
ggttcaccctgtctaccact

SEQ ID NO: 3456 - DNA, 20 bp, Artificial sequence
  Synthetic oligonucleotide
ggattcgccattccagccaa

SEQ ID NO: 3457 - DNA, 20 bp, Artificial sequence
  Synthetic oligonucleotide
tgtatatttatctaaacata

SEQ ID NO: 3458 - DNA, 20 bp, Artificial sequence
  Synthetic oligonucleotide
cgtgtgtcatgccaaggctc

SEQ ID NO: 3459 - DNA, 20 bp, Artificial sequence
  Synthetic oligonucleotide
aaggcatctctgattcttgc

SEQ ID NO: 3460 - DNA, 20 bp, Artificial sequence
  Synthetic oligonucleotide
ccacactgtttgacccctgc

SEQ ID NO: 3461 - DNA, 20 bp, Artificial sequence
  Synthetic oligonucleotide
ggtccctcactgactgtcat

SEQ ID NO: 3462 - DNA, 20 bp, Artificial sequence
  Synthetic oligonucleotide
tgctaattttcacagcttaa

SEQ ID NO: 3463 - DNA, 20 bp, Artificial sequence
  Synthetic oligonucleotide
ggttatatctaccagcatcc

SEQ ID NO: 3464 - DNA, 20 bp, Artificial sequence
  Synthetic oligonucleotide
attcttattccccaacatta

SEQ ID NO: 3465 - DNA, 20 bp, Artificial sequence
  Synthetic oligonucleotide
tggtctactagatttatctc

SEQ ID NO: 3466 - DNA, 20 bp, Artificial sequence
  Synthetic oligonucleotide
ctgatcaatttcatgtctca

SEQ ID NO: 3467 - DNA, 20 bp, Artificial sequence
  Synthetic oligonucleotide
caggacatactacagctggc

SEQ ID NO: 3468 - DNA, 20 bp, Artificial sequence
  Synthetic oligonucleotide
gcctcatatcatgatgcccc

SEQ ID NO: 3469 - DNA, 20 bp, Artificial sequence
  Synthetic oligonucleotide
ccatggctaccttcttgacc

SEQ ID NO: 3470 - DNA, 20 bp, Artificial sequence
  Synthetic oligonucleotide
aagtctttacttcccatcca

SEQ ID NO: 3471 - DNA, 20 bp, Artificial sequence
  Synthetic oligonucleotide
ggttcacttaccttcggtct

SEQ ID NO: 3472 - DNA, 20 bp, Artificial sequence
  Synthetic oligonucleotide
aatttgcataacaattcctc

SEQ ID NO: 3473 - DNA, 20 bp, Artificial sequence
  Synthetic oligonucleotide
gcacagcttctgctattgcc

SEQ ID NO: 3474 - DNA, 20 bp, Artificial sequence
  Synthetic oligonucleotide
acggatgcttatgaaagcca

SEQ ID NO: 3475 - DNA, 20 bp, Artificial sequence
  Synthetic oligonucleotide
aggcactgccattatcccat

SEQ ID NO: 3476 - DNA, 20 bp, Artificial sequence
  Synthetic oligonucleotide
atcaactggattatcagctt

SEQ ID NO: 3477 - DNA, 20 bp, Artificial sequence
  Synthetic oligonucleotide
ggacagtttttctaacttca

SEQ ID NO: 3478 - DNA, 20 bp, Artificial sequence
  Synthetic oligonucleotide
cactcatcatgcattcttct

SEQ ID NO: 3479 - DNA, 20 bp, Artificial sequence
  Synthetic oligonucleotide
tgtcaggcatagcattcacc

SEQ ID NO: 3480 - DNA, 20 bp, Artificial sequence
  Synthetic oligonucleotide
gcaactaccaatgttccatc

SEQ ID NO: 3481 - DNA, 20 bp, Artificial sequence
  Synthetic oligonucleotide
gttctcattcagacattact

SEQ ID NO: 3482 - DNA, 20 bp, Artificial sequence
  Synthetic oligonucleotide
taagtccttcaccagctacc

SEQ ID NO: 3483 - DNA, 20 bp, Artificial sequence
  Synthetic oligonucleotide
cgtttcactcttgattctct

SEQ ID NO: 3484 - DNA, 20 bp, Artificial sequence
  Synthetic oligonucleotide
tctagcccagaggctttctc

SEQ ID NO: 3485 - DNA, 20 bp, Artificial sequence
  Synthetic oligonucleotide
tctgcacgatttctgacctc

SEQ ID NO: 3486 - DNA, 20 bp, Artificial sequence
  Synthetic oligonucleotide
atactttccctaagtttgcc

SEQ ID NO: 3487 - DNA, 20 bp, Artificial sequence
  Synthetic oligonucleotide
tgaggtgttccaccatgtca

SEQ ID NO: 3488 - DNA, 20 bp, Artificial sequence
  Synthetic oligonucleotide
taggcaccatgttattcata

SEQ ID NO: 3489 - DNA, 20 bp, Artificial sequence
  Synthetic oligonucleotide
gcctgtggtatcactgggct

SEQ ID NO: 3490 - DNA, 20 bp, Artificial sequence
  Synthetic oligonucleotide
cactcagtagctttttgcca

SEQ ID NO: 3491 - DNA, 20 bp, Artificial sequence
  Synthetic oligonucleotide
cagctctccttacaagttta

SEQ ID NO: 3492 - DNA, 20 bp, Artificial sequence
  Synthetic oligonucleotide
agtgttaactcatatcaggt

SEQ ID NO: 3493 - DNA, 20 bp, Artificial sequence
  Synthetic oligonucleotide
ctggtgttttaattttggca

SEQ ID NO: 3494 - DNA, 20 bp, Artificial sequence
  Synthetic oligonucleotide
ttgcagtatcacctgtacta

SEQ ID NO: 3495 - DNA, 20 bp, Artificial sequence
  Synthetic oligonucleotide
ggtactaatgtacccagcac

SEQ ID NO: 3496 - DNA, 20 bp, Artificial sequence
  Synthetic oligonucleotide
gtcaagttaacacagagtta

SEQ ID NO: 3497 - DNA, 20 bp, Artificial sequence
  Synthetic oligonucleotide
gttcagccctacttctggca

SEQ ID NO: 3498 - DNA, 20 bp, Artificial sequence
  Synthetic oligonucleotide
tctgatcttagatccagtaa

SEQ ID NO: 3499 - DNA, 20 bp, Artificial sequence
  Synthetic oligonucleotide
tgctttcactccatgtgttc

SEQ ID NO: 3500 - DNA, 20 bp, Artificial sequence
  Synthetic oligonucleotide
gcagtcattgtcactagcct

SEQ ID NO: 3501 - DNA, 20 bp, Artificial sequence
  Synthetic oligonucleotide
tgtgcttcccaaacagtgta

SEQ ID NO: 3502 - DNA, 20 bp, Artificial sequence
  Synthetic oligonucleotide
atctcccttactgcacttga

SEQ ID NO: 3503 - DNA, 20 bp, Artificial sequence
  Synthetic oligonucleotide
aggttcaagcgaactcccac

SEQ ID NO: 3504 - DNA, 20 bp, Artificial sequence
  Synthetic oligonucleotide
ctgcccagtattcattcttc

SEQ ID NO: 3505 - DNA, 20 bp, Artificial sequence
  Synthetic oligonucleotide
gggttcaccttaatgcctct

SEQ ID NO: 3506 - DNA, 20 bp, Artificial sequence
  Synthetic oligonucleotide
agtccttcaccagctaccct

SEQ ID NO: 3507 - DNA, 20 bp, Artificial sequence
  Synthetic oligonucleotide
ctcactcttcgcaactctca

SEQ ID NO: 3508 - DNA, 20 bp, Artificial sequence
  Synthetic oligonucleotide
gtcgactctagaacggtgct

SEQ ID NO: 3509 - DNA, 20 bp, Artificial sequence
  Synthetic oligonucleotide
gttcacttaccttcggtctt

SEQ ID NO: 3510 - DNA, 20 bp, Artificial sequence
  Synthetic oligonucleotide
gtttgacctacacagcgaaa

SEQ ID NO: 3511 - DNA, 20 bp, Artificial sequence
  Synthetic oligonucleotide
tggctgtgtttacattctta

SEQ ID NO: 3512 - DNA, 20 bp, Artificial sequence
  Synthetic oligonucleotide
gttatatctaccagcatcct

SEQ ID NO: 3513 - DNA, 20 bp, Artificial sequence
  Synthetic oligonucleotide
agcctagtttttcctctcca

SEQ ID NO: 3514 - DNA, 20 bp, Artificial sequence
  Synthetic oligonucleotide
accaatctacaaaccaagca

SEQ ID NO: 3515 - DNA, 20 bp, Artificial sequence
  Synthetic oligonucleotide
gctctcattaatcatcagga

SEQ ID NO: 3516 - DNA, 20 bp, Artificial sequence
  Synthetic oligonucleotide
gtgcttcccaaacagtgtat

SEQ ID NO: 3517 - DNA, 20 bp, Artificial sequence
  Synthetic oligonucleotide
ggacagagttccatttgtgc

SEQ ID NO: 3518 - DNA, 20 bp, Artificial sequence
  Synthetic oligonucleotide
tagaatgtttttctccagcc

SEQ ID NO: 3519 - DNA, 20 bp, Artificial sequence
  Synthetic oligonucleotide
tggtcctcacaacaccacaa

SEQ ID NO: 3520 - DNA, 20 bp, Artificial sequence
  Synthetic oligonucleotide
gcattcttctctaaacttgc

SEQ ID NO: 3521 - DNA, 20 bp, Artificial sequence
  Synthetic oligonucleotide
gttaggtattcacttagtac

SEQ ID NO: 3522 - DNA, 20 bp, Artificial sequence
  Synthetic oligonucleotide
gctctcatttctttgaacgc

SEQ ID NO: 3523 - DNA, 20 bp, Artificial sequence
  Synthetic oligonucleotide
tcaataaaatattagcaaaa

SEQ ID NO: 3524 - DNA, 20 bp, Artificial sequence
  Synthetic oligonucleotide
tgcccagtattcattcttct

SEQ ID NO: 3525 - DNA, 20 bp, Artificial sequence
  Synthetic oligonucleotide
ctgtctaccactgtttgcct

SEQ ID NO: 3526 - DNA, 20 bp, Artificial sequence
  Synthetic oligonucleotide
aggcatttaactctgtctta

SEQ ID NO: 3527 - DNA, 20 bp, Artificial sequence
  Synthetic oligonucleotide
actcagtagctttttgccat

SEQ ID NO: 3528 - DNA, 20 bp, Artificial sequence
  Synthetic oligonucleotide
ttccagctttatacaccctt

SEQ ID NO: 3529 - DNA, 20 bp, Artificial sequence
  Synthetic oligonucleotide
aggcatctctgattcttgca

SEQ ID NO: 3530 - DNA, 20 bp, Artificial sequence
  Synthetic oligonucleotide
gttcaccttaatgcctctca

SEQ ID NO: 3531 - DNA, 20 bp, Artificial sequence
  Synthetic oligonucleotide
gcatgtgcaaatgactgaca

SEQ ID NO: 3532 - DNA, 20 bp, Artificial sequence
  Synthetic oligonucleotide
cagcactgttgaccactact

SEQ ID NO: 3533 - DNA, 20 bp, Artificial sequence
  Synthetic oligonucleotide
gatcaatttcatgtctcacc

SEQ ID NO: 3534 - DNA, 20 bp, Artificial sequence
  Synthetic oligonucleotide
ttctcattcagacattacta

SEQ ID NO: 3535 - DNA, 20 bp, Artificial sequence
  Synthetic oligonucleotide
gccattatcccattctgtgt

SEQ ID NO: 3536 - DNA, 20 bp, Artificial sequence
  Synthetic oligonucleotide
atgttttatacttccaagca

SEQ ID NO: 3537 - DNA, 20 bp, Artificial sequence
  Synthetic oligonucleotide
tcccttactgcacttgagct

SEQ ID NO: 3538 - DNA, 20 bp, Artificial sequence
  Synthetic oligonucleotide
tctatctatctaaacatata

SEQ ID NO: 3539 - DNA, 20 bp, Artificial sequence
  Synthetic oligonucleotide
aggcatagcattcaccatga

SEQ ID NO: 3540 - DNA, 20 bp, Artificial sequence
  Synthetic oligonucleotide
atggtcattgcctcaagtct

SEQ ID NO: 3541 - DNA, 20 bp, Artificial sequence
  Synthetic oligonucleotide
ccacctagctctttaattcc

SEQ ID NO: 3542 - DNA, 20 bp, Artificial sequence
  Synthetic oligonucleotide
ctccatatgccaattccata

SEQ ID NO: 3543 - DNA, 20 bp, Artificial sequence
  Synthetic oligonucleotide
gtcatatattaatagctcta

SEQ ID NO: 3544 - DNA, 20 bp, Artificial sequence
  Synthetic oligonucleotide
gctctgatagaatttctgga

SEQ ID NO: 3545 - DNA, 20 bp, Artificial sequence
  Synthetic oligonucleotide
atggtcctagtaaccagacc

SEQ ID NO: 3546 - DNA, 20 bp, Artificial sequence
  Synthetic oligonucleotide
tatatttatctaaacatata

SEQ ID NO: 3547 - DNA, 20 bp, Artificial sequence
  Synthetic oligonucleotide
gcaccatgttattcatatct

SEQ ID NO: 3548 - DNA, 20 bp, Artificial sequence
  Synthetic oligonucleotide
atgtaacatgcctctctgtt

SEQ ID NO: 3549 - DNA, 20 bp, Artificial sequence
  Synthetic oligonucleotide
ttcaagtgcttttaaaaatt

SEQ ID NO: 3550 - DNA, 20 bp, Artificial sequence
  Synthetic oligonucleotide
ggtccattttatcttccaaa

SEQ ID NO: 3551 - DNA, 20 bp, Artificial sequence
  Synthetic oligonucleotide
ccccaacattaagatttcaa

SEQ ID NO: 3552 - DNA, 20 bp, Artificial sequence
  Synthetic oligonucleotide
gagtctttccaacaaggcac

SEQ ID NO: 3553 - DNA, 20 bp, Artificial sequence
  Synthetic oligonucleotide
tgttatgcttgatccagcat

SEQ ID NO: 3554 - DNA, 20 bp, Artificial sequence
  Synthetic oligonucleotide
ttagtctcacctcatctgca

SEQ ID NO: 3555 - DNA, 20 bp, Artificial sequence
  Synthetic oligonucleotide
ttgcataacaattcctctga

SEQ ID NO: 3556 - DNA, 20 bp, Artificial sequence
  Synthetic oligonucleotide
gttccttgcaatcacatgct

SEQ ID NO: 3557 - DNA, 20 bp, Artificial sequence
  Synthetic oligonucleotide
gttacaggctgcattagcta

SEQ ID NO: 3558 - DNA, 20 bp, Artificial sequence
  Synthetic oligonucleotide
gccatgaattgaaacttgca

SEQ ID NO: 3559 - DNA, 20 bp, Artificial sequence
  Synthetic oligonucleotide
tctaggcagtacactcatct

SEQ ID NO: 3560 - DNA, 20 bp, Artificial sequence
  Synthetic oligonucleotide
gctctctgaatccacttggt

SEQ ID NO: 3561 - DNA, 20 bp, Artificial sequence
  Synthetic oligonucleotide
tctgcactacattctgttgc

SEQ ID NO: 3562 - DNA, 20 bp, Artificial sequence
  Synthetic oligonucleotide
aagcacagacatgctacctc

SEQ ID NO: 3563 - DNA, 20 bp, Artificial sequence
  Synthetic oligonucleotide
caaccttcttgactagggcc

SEQ ID NO: 3564 - DNA, 20 bp, Artificial sequence
  Synthetic oligonucleotide
ttccacatttcattcaaggt

SEQ ID NO: 3565 - DNA, 20 bp, Artificial sequence
  Synthetic oligonucleotide
agctccatttagctttgaca

SEQ ID NO: 3566 - DNA, 20 bp, Artificial sequence
  Synthetic oligonucleotide
gcccactctctgcacttaga

SEQ ID NO: 3567 - DNA, 20 bp, Artificial sequence
  Synthetic oligonucleotide
gaggtgttccaccatgtcaa

SEQ ID NO: 3568 - DNA, 20 bp, Artificial sequence
  Synthetic oligonucleotide
gctctccttacaagtttact

SEQ ID NO: 3569 - DNA, 20 bp, Artificial sequence
  Synthetic oligonucleotide
gtctactagatttatctcaa

SEQ ID NO: 3570 - DNA, 20 bp, Artificial sequence
  Synthetic oligonucleotide
ttccatttctggcttagcca

SEQ ID NO: 3571 - DNA, 20 bp, Artificial sequence
  Synthetic oligonucleotide
cctcaagtattcttagaagc

SEQ ID NO: 3572 - DNA, 20 bp, Artificial sequence
  Synthetic oligonucleotide
ggcttattcctgcttagcta

SEQ ID NO: 3573 - DNA, 20 bp, Artificial sequence
  Synthetic oligonucleotide
gtcagactgcatatctttca

SEQ ID NO: 3574 - DNA, 20 bp, Artificial sequence
  Synthetic oligonucleotide
cacactgtttgacccctgct

SEQ ID NO: 3575 - DNA, 20 bp, Artificial sequence
  Synthetic oligonucleotide
ccactctgatgaatatgtca

SEQ ID NO: 3576 - DNA, 20 bp, Artificial sequence
  Synthetic oligonucleotide
ctggatctctccatagcata

SEQ ID NO: 3577 - DNA, 20 bp, Artificial sequence
  Synthetic oligonucleotide
gctttatctaagcatcttta

SEQ ID NO: 3578 - DNA, 20 bp, Artificial sequence
  Synthetic oligonucleotide
ttccaaggtcataatcagga

SEQ ID NO: 3579 - DNA, 20 bp, Artificial sequence
  Synthetic oligonucleotide
gcttgcattaccttggctaa

SEQ ID NO: 3580 - DNA, 20 bp, Artificial sequence
  Synthetic oligonucleotide
tctctgtgttcctctaacaa

SEQ ID NO: 3581 - DNA, 20 bp, Artificial sequence
  Synthetic oligonucleotide
tggacagtcataatatccct

SEQ ID NO: 3582 - DNA, 20 bp, Artificial sequence
  Synthetic oligonucleotide
ggtctcattatgtcaattca

SEQ ID NO: 3583 - DNA, 20 bp, Artificial sequence
  Synthetic oligonucleotide
tcgcaactctcaattacagc

SEQ ID NO: 3584 - DNA, 20 bp, Artificial sequence
  Synthetic oligonucleotide
aagcaatatttagcatggca

SEQ ID NO: 3585 - DNA, 20 bp, Artificial sequence
  Synthetic oligonucleotide
taactgtagtttttcactct

SEQ ID NO: 3586 - DNA, 20 bp, Artificial sequence
  Synthetic oligonucleotide
gcttgtcctatacaaagaca

SEQ ID NO: 3587 - DNA, 20 bp, Artificial sequence
  Synthetic oligonucleotide
gacagagttccatttgtgct

SEQ ID NO: 3588 - DNA, 20 bp, Artificial sequence
  Synthetic oligonucleotide
actgattccacaccctgtga

SEQ ID NO: 3589 - DNA, 20 bp, Artificial sequence
  Synthetic oligonucleotide
gaagggtcacctcaactctt

SEQ ID NO: 3590 - DNA, 20 bp, Artificial sequence
  Synthetic oligonucleotide
ccatcaacttactagctggt

SEQ ID NO: 3591 - DNA, 20 bp, Artificial sequence
  Synthetic oligonucleotide
atgtcaattcataaccagca

SEQ ID NO: 3592 - DNA, 20 bp, Artificial sequence
  Synthetic oligonucleotide
tcaccaatccctatgttcat

SEQ ID NO: 3593 - DNA, 20 bp, Artificial sequence
  Synthetic oligonucleotide
tttatctatataaacataca

SEQ ID NO: 3594 - DNA, 20 bp, Artificial sequence
  Synthetic oligonucleotide
agagctgttttcacttcatc

SEQ ID NO: 3595 - DNA, 20 bp, Artificial sequence
  Synthetic oligonucleotide
tgcgggattttaccaacggc

SEQ ID NO: 3596 - DNA, 20 bp, Artificial sequence
  Synthetic oligonucleotide
ccacaatgctgcatccctta

SEQ ID NO: 3597 - DNA, 20 bp, Artificial sequence
  Synthetic oligonucleotide
gtaacatgcctctctgttgc

SEQ ID NO: 3598 - DNA, 20 bp, Artificial sequence
  Synthetic oligonucleotide
actctgtcttaattctgact

SEQ ID NO: 3599 - DNA, 20 bp, Artificial sequence
  Synthetic oligonucleotide
gcagcatcatcgacctccca

SEQ ID NO: 3600 - DNA, 20 bp, Artificial sequence
  Synthetic oligonucleotide
atatttatctaaacatatac

SEQ ID NO: 3601 - DNA, 20 bp, Artificial sequence
  Synthetic oligonucleotide
gtggctttacatatatgtca

SEQ ID NO: 3602 - DNA, 20 bp, Artificial sequence
  Synthetic oligonucleotide
gcatgaatatagcacaagga

SEQ ID NO: 3603 - DNA, 20 bp, Artificial sequence
  Synthetic oligonucleotide
tcaccttaatgcctctcagc

SEQ ID NO: 3604 - DNA, 20 bp, Artificial sequence
  Synthetic oligonucleotide
ataacaattcctctgataat

SEQ ID NO: 3605 - DNA, 20 bp, Artificial sequence
  Synthetic oligonucleotide
gcatactttcctaccttggg

SEQ ID NO: 3606 - DNA, 20 bp, Artificial sequence
  Synthetic oligonucleotide
atagacctactagctgggca

SEQ ID NO: 3607 - DNA, 20 bp, Artificial sequence
  Synthetic oligonucleotide
tctcatttctttgaacgcaa

SEQ ID NO: 3608 - DNA, 20 bp, Artificial sequence
  Synthetic oligonucleotide
tcaagtgcttttaaaaatta

SEQ ID NO: 3609 - DNA, 20 bp, Artificial sequence
  Synthetic oligonucleotide
ccagcatatctagttatttc

SEQ ID NO: 3610 - DNA, 20 bp, Artificial sequence
  Synthetic oligonucleotide
aatgcagatttaacttttga

SEQ ID NO: 3611 - DNA, 20 bp, Artificial sequence
  Synthetic oligonucleotide
agcacagacatgctacctca

SEQ ID NO: 3612 - DNA, 20 bp, Artificial sequence
  Synthetic oligonucleotide
tcagtcagccaaattccctt

SEQ ID NO: 3613 - DNA, 20 bp, Artificial sequence
  Synthetic oligonucleotide
gttttatacttccaagcaca

SEQ ID NO: 3614 - DNA, 20 bp, Artificial sequence
  Synthetic oligonucleotide
gcacaagttctgccgctcac

SEQ ID NO: 3615 - DNA, 20 bp, Artificial sequence
  Synthetic oligonucleotide
atgcactgtactgactccac

SEQ ID NO: 3616 - DNA, 20 bp, Artificial sequence
  Synthetic oligonucleotide
atccacattttcctggaggt

SEQ ID NO: 3617 - DNA, 20 bp, Artificial sequence
  Synthetic oligonucleotide
agttgcatgccttatctttc

SEQ ID NO: 3618 - DNA, 20 bp, Artificial sequence
  Synthetic oligonucleotide
tgggagtgactcactcagct

SEQ ID NO: 3619 - DNA, 20 bp, Artificial sequence
  Synthetic oligonucleotide
gtccttcaccagctaccctt

SEQ ID NO: 3620 - DNA, 20 bp, Artificial sequence
  Synthetic oligonucleotide
ggcatctctgattcttgcat

SEQ ID NO: 3621 - DNA, 20 bp, Artificial sequence
  Synthetic oligonucleotide
aaatattagcaaaatgaatc

SEQ ID NO: 3622 - DNA, 20 bp, Artificial sequence
  Synthetic oligonucleotide
agcactgttgaccactactt

SEQ ID NO: 3623 - DNA, 20 bp, Artificial sequence
  Synthetic oligonucleotide
gcttctctccttcttcaagc

SEQ ID NO: 3624 - DNA, 20 bp, Artificial sequence
  Synthetic oligonucleotide
ccacaaacactgcaacagct

SEQ ID NO: 3625 - DNA, 20 bp, Artificial sequence
  Synthetic oligonucleotide
cccttctatcatgccattcc

SEQ ID NO: 3626 - DNA, 20 bp, Artificial sequence
  Synthetic oligonucleotide
gctggcatctttgtttattt

SEQ ID NO: 3627 - DNA, 20 bp, Artificial sequence
  Synthetic oligonucleotide
gcacagtacttctctcaggg

SEQ ID NO: 3628 - DNA, 20 bp, Artificial sequence
  Synthetic oligonucleotide
gaagcagtacttatcattct

SEQ ID NO: 3629 - DNA, 20 bp, Artificial sequence
  Synthetic oligonucleotide
tccagctttatacacccttt

SEQ ID NO: 3630 - DNA, 20 bp, Artificial sequence
  Synthetic oligonucleotide
ggttccttcaaatactttta

SEQ ID NO: 3631 - DNA, 20 bp, Artificial sequence
  Synthetic oligonucleotide
gttactaatgtctactgtct

SEQ ID NO: 3632 - DNA, 20 bp, Artificial sequence
  Synthetic oligonucleotide
cacctagctctttaattcct

SEQ ID NO: 3633 - DNA, 20 bp, Artificial sequence
  Synthetic oligonucleotide
tggtcattgcctcaagtctc

SEQ ID NO: 3634 - DNA, 20 bp, Artificial sequence
  Synthetic oligonucleotide
caccatgttattcatatcta

SEQ ID NO: 3635 - DNA, 20 bp, Artificial sequence
  Synthetic oligonucleotide
agcatggttttcaagaccct

SEQ ID NO: 3636 - DNA, 20 bp, Artificial sequence
  Synthetic oligonucleotide
ctgcactacattctgttgca

SEQ ID NO: 3637 - DNA, 20 bp, Artificial sequence
  Synthetic oligonucleotide
gtccattttatcttccaaac

SEQ ID NO: 3638 - DNA, 20 bp, Artificial sequence
  Synthetic oligonucleotide
tgccaattccatactaactt

SEQ ID NO: 3639 - DNA, 20 bp, Artificial sequence
  Synthetic oligonucleotide
gtctcacctcatctgcaggc

SEQ ID NO: 3640 - DNA, 20 bp, Artificial sequence
  Synthetic oligonucleotide
tagctttttgccattcatcc

SEQ ID NO: 3641 - DNA, 20 bp, Artificial sequence
  Synthetic oligonucleotide
gctttagtattctaatgagt

SEQ ID NO: 3642 - DNA, 20 bp, Artificial sequence
  Synthetic oligonucleotide
tgacttagttactccaagct

SEQ ID NO: 3643 - DNA, 20 bp, Artificial sequence
  Synthetic oligonucleotide
gggcaaaccacttaagtcat

SEQ ID NO: 3644 - DNA, 20 bp, Artificial sequence
  Synthetic oligonucleotide
ctctccatagcatagagtat

SEQ ID NO: 3645 - DNA, 20 bp, Artificial sequence
  Synthetic oligonucleotide
ctctaacaagatcacatctc

SEQ ID NO: 3646 - DNA, 20 bp, Artificial sequence
  Synthetic oligonucleotide
catgaattgaaacttgcagc

SEQ ID NO: 3647 - DNA, 20 bp, Artificial sequence
  Synthetic oligonucleotide
acccagcttctatcactctc

SEQ ID NO: 3648 - DNA, 20 bp, Artificial sequence
  Synthetic oligonucleotide
tggtcctagtaaccagacca

SEQ ID NO: 3649 - DNA, 20 bp, Artificial sequence
  Synthetic oligonucleotide
gcaaaggttcaaagaaccct

SEQ ID NO: 3650 - DNA, 20 bp, Artificial sequence
  Synthetic oligonucleotide
atctaccagcatcctaaggt

SEQ ID NO: 3651 - DNA, 20 bp, Artificial sequence
  Synthetic oligonucleotide
cccttactgcacttgagctc

SEQ ID NO: 3652 - DNA, 20 bp, Artificial sequence
  Synthetic oligonucleotide
ccttctctatccattgtttc

SEQ ID NO: 3653 - DNA, 20 bp, Artificial sequence
  Synthetic oligonucleotide
gaagacactacagagtatgc

SEQ ID NO: 3654 - DNA, 20 bp, Artificial sequence
  Synthetic oligonucleotide
aggttcctcaacttttcttc

SEQ ID NO: 3655 - DNA, 20 bp, Artificial sequence
  Synthetic oligonucleotide
cccaacattaagatttcaat

SEQ ID NO: 3656 - DNA, 20 bp, Artificial sequence
  Synthetic oligonucleotide
cctcaacatttgctaagtgc

SEQ ID NO: 3657 - DNA, 20 bp, Artificial sequence
  Synthetic oligonucleotide
gcacaatcccaatttagact

SEQ ID NO: 3658 - DNA, 20 bp, Artificial sequence
  Synthetic oligonucleotide
agtctttccaacaaggcacc

SEQ ID NO: 3659 - DNA, 20 bp, Artificial sequence
  Synthetic oligonucleotide
gtgtgttcaggattcatgtc

SEQ ID NO: 3660 - DNA, 20 bp, Artificial sequence
  Synthetic oligonucleotide
gggcaaatagctctaagtct

SEQ ID NO: 3661 - DNA, 20 bp, Artificial sequence
  Synthetic oligonucleotide
tctcacctcatctgcaggct

SEQ ID NO: 3662 - DNA, 20 bp, Artificial sequence
  Synthetic oligonucleotide
gcacaaattgtcaacagctt

SEQ ID NO: 3663 - DNA, 20 bp, Artificial sequence
  Synthetic oligonucleotide
gcagtacttatcattctagt

SEQ ID NO: 3664 - DNA, 20 bp, Artificial sequence
  Synthetic oligonucleotide
ccagtcttcaatgcccttcc

SEQ ID NO: 3665 - DNA, 20 bp, Artificial sequence
  Synthetic oligonucleotide
gcatatctagttatttcaca

SEQ ID NO: 3666 - DNA, 20 bp, Artificial sequence
  Synthetic oligonucleotide
gttgcaggctactcttgacc

SEQ ID NO: 3667 - DNA, 20 bp, Artificial sequence
  Synthetic oligonucleotide
ctgtagtttttcactctaga

SEQ ID NO: 3668 - DNA, 20 bp, Artificial sequence
  Synthetic oligonucleotide
agctttttgccattcatcca

SEQ ID NO: 3669 - DNA, 20 bp, Artificial sequence
  Synthetic oligonucleotide
gcacagacatgctacctcat

SEQ ID NO: 3670 - DNA, 20 bp, Artificial sequence
  Synthetic oligonucleotide
tgtgatgttcacctgattca

SEQ ID NO: 3671 - DNA, 20 bp, Artificial sequence
  Synthetic oligonucleotide
gtgcaattttacagactcct

SEQ ID NO: 3672 - DNA, 20 bp, Artificial sequence
  Synthetic oligonucleotide
tctcaattacagcctaggga

SEQ ID NO: 3673 - DNA, 20 bp, Artificial sequence
  Synthetic oligonucleotide
atttatctaaacatatacat

SEQ ID NO: 3674 - DNA, 20 bp, Artificial sequence
  Synthetic oligonucleotide
cagaaatgatgaacccatcc

SEQ ID NO: 3675 - DNA, 20 bp, Artificial sequence
  Synthetic oligonucleotide
ttgcacttgccctctgactc

SEQ ID NO: 3676 - DNA, 20 bp, Artificial sequence
  Synthetic oligonucleotide
cttccattgagacttaactt

SEQ ID NO: 3677 - DNA, 20 bp, Artificial sequence
  Synthetic oligonucleotide
catcaacttactagctggtc

SEQ ID NO: 3678 - DNA, 20 bp, Artificial sequence
  Synthetic oligonucleotide
gttgcatgccttatctttcc

SEQ ID NO: 3679 - DNA, 20 bp, Artificial sequence
  Synthetic oligonucleotide
attagcaaaatgaatccaac

SEQ ID NO: 3680 - DNA, 20 bp, Artificial sequence
  Synthetic oligonucleotide
gatggctttttcattaacca

SEQ ID NO: 3681 - DNA, 20 bp, Artificial sequence
  Synthetic oligonucleotide
ttttccttgcaactatggcc

SEQ ID NO: 3682 - DNA, 20 bp, Artificial sequence
  Synthetic oligonucleotide
acctagctctttaattcctc

SEQ ID NO: 3683 - DNA, 20 bp, Artificial sequence
  Synthetic oligonucleotide
gggttttccaccctgcctcc

SEQ ID NO: 3684 - DNA, 20 bp, Artificial sequence
  Synthetic oligonucleotide
actctgttctagtaccacac

SEQ ID NO: 3685 - DNA, 20 bp, Artificial sequence
  Synthetic oligonucleotide
caagtgcttttaaaaattat

SEQ ID NO: 3686 - DNA, 20 bp, Artificial sequence
  Synthetic oligonucleotide
caccaatccctatgttcata

SEQ ID NO: 3687 - DNA, 20 bp, Artificial sequence
  Synthetic oligonucleotide
gctggagatagacatgaact

SEQ ID NO: 3688 - DNA, 20 bp, Artificial sequence
  Synthetic oligonucleotide
ttgcagcacagacaaagcat

SEQ ID NO: 3689 - DNA, 20 bp, Artificial sequence
  Synthetic oligonucleotide
gcatggttttcaagaccctc

SEQ ID NO: 3690 - DNA, 20 bp, Artificial sequence
  Synthetic oligonucleotide
tgtcaattcataaccagcat

SEQ ID NO: 3691 - DNA, 20 bp, Artificial sequence
  Synthetic oligonucleotide
gcgggattttaccaacggct

SEQ ID NO: 3692 - DNA, 20 bp, Artificial sequence
  Synthetic oligonucleotide
aagccatgaacaatgtgtct

SEQ ID NO: 3693 - DNA, 20 bp, Artificial sequence
  Synthetic oligonucleotide
ggtccatcaataatgtgtca

SEQ ID NO: 3694 - DNA, 20 bp, Artificial sequence
  Synthetic oligonucleotide
gcatctctgattcttgcata

SEQ ID NO: 3695 - DNA, 20 bp, Artificial sequence
  Synthetic oligonucleotide
cagctttatacaccctttct

SEQ ID NO: 3696 - DNA, 20 bp, Artificial sequence
  Synthetic oligonucleotide
gcacagacagttatcttggc

SEQ ID NO: 3697 - DNA, 20 bp, Artificial sequence
  Synthetic oligonucleotide
aggttcaaagaaccctccta

SEQ ID NO: 3698 - DNA, 20 bp, Artificial sequence
  Synthetic oligonucleotide
gcactgtactgactccactt

SEQ ID NO: 3699 - DNA, 20 bp, Artificial sequence
  Synthetic oligonucleotide
ggtcctagtaaccagaccac

SEQ ID NO: 3700 - DNA, 20 bp, Artificial sequence
  Synthetic oligonucleotide
tcatatctatatgctaccca

SEQ ID NO: 3701 - DNA, 20 bp, Artificial sequence
  Synthetic oligonucleotide
atgcagatttaacttttgac

SEQ ID NO: 3702 - DNA, 20 bp, Artificial sequence
  Synthetic oligonucleotide
ccttctatcatgccattcct

SEQ ID NO: 3703 - DNA, 20 bp, Artificial sequence
  Synthetic oligonucleotide
gcaacagctttccatctggt

SEQ ID NO: 3704 - DNA, 20 bp, Artificial sequence
  Synthetic oligonucleotide
gcacactgtaaaagacagca

SEQ ID NO: 3705 - DNA, 20 bp, Artificial sequence
  Synthetic oligonucleotide
gagctgttttcacttcatca

SEQ ID NO: 3706 - DNA, 20 bp, Artificial sequence
  Synthetic oligonucleotide
gcacttaatacatcatgcct

SEQ ID NO: 3707 - DNA, 20 bp, Artificial sequence
  Synthetic oligonucleotide
gccaattccatactaactta

SEQ ID NO: 3708 - DNA, 20 bp, Artificial sequence
  Synthetic oligonucleotide
gtgtgctactgctactatgc

SEQ ID NO: 3709 - DNA, 20 bp, Artificial sequence
  Synthetic oligonucleotide
gtcttaattctgacttcagc

SEQ ID NO: 3710 - DNA, 20 bp, Artificial sequence
  Synthetic oligonucleotide
tccttcttcaagcagacttc

SEQ ID NO: 3711 - DNA, 20 bp, Artificial sequence
  Synthetic oligonucleotide
acaattcctctgataattat

SEQ ID NO: 3712 - DNA, 20 bp, Artificial sequence
  Synthetic oligonucleotide
tggttgtgctcactcttaga

SEQ ID NO: 3713 - DNA, 20 bp, Artificial sequence
  Synthetic oligonucleotide
gctcagtccccatagatggc

SEQ ID NO: 3714 - DNA, 20 bp, Artificial sequence
  Synthetic oligonucleotide
gccaacacatagcggttctc

SEQ ID NO: 3715 - DNA, 20 bp, Artificial sequence
  Synthetic oligonucleotide
caccttaatgcctctcagct

SEQ ID NO: 3716 - DNA, 20 bp, Artificial sequence
  Synthetic oligonucleotide
gacttagttactccaagctc

SEQ ID NO: 3717 - DNA, 20 bp, Artificial sequence
  Synthetic oligonucleotide
ccagcatcctaaggtatcca

SEQ ID NO: 3718 - DNA, 20 bp, Artificial sequence
  Synthetic oligonucleotide
tgctgcatcccttacactgt

SEQ ID NO: 3719 - DNA, 20 bp, Artificial sequence
  Synthetic oligonucleotide
ccatttgtgcttaacttaca

SEQ ID NO: 3720 - DNA, 20 bp, Artificial sequence
  Synthetic oligonucleotide
cccagcttctatcactctct

SEQ ID NO: 3721 - DNA, 20 bp, Artificial sequence
  Synthetic oligonucleotide
gctgccccatgatctccatc

SEQ ID NO: 3722 - DNA, 20 bp, Artificial sequence
  Synthetic oligonucleotide
agcactctttcccctcgctc

SEQ ID NO: 3723 - DNA, 20 bp, Artificial sequence
  Synthetic oligonucleotide
gtgcatacaacaagggaagc

SEQ ID NO: 3724 - DNA, 20 bp, Artificial sequence
  Synthetic oligonucleotide
ggctttacatatatgtcatc

SEQ ID NO: 3725 - DNA, 20 bp, Artificial sequence
  Synthetic oligonucleotide
atgtattcaccaacctcggc

SEQ ID NO: 3726 - DNA, 20 bp, Artificial sequence
  Synthetic oligonucleotide
gttttctttaaatctgcagc

SEQ ID NO: 3727 - DNA, 20 bp, Artificial sequence
  Synthetic oligonucleotide
tgacacttttattctgtacc

SEQ ID NO: 3728 - DNA, 20 bp, Artificial sequence
  Synthetic oligonucleotide
agctcttctcccattccacc

SEQ ID NO: 3729 - DNA, 20 bp, Artificial sequence
  Synthetic oligonucleotide
ctcatgacagttctcacaat

SEQ ID NO: 3730 - DNA, 20 bp, Artificial sequence
  Synthetic oligonucleotide
gggtcacctcaactcttggc

SEQ ID NO: 3731 - DNA, 20 bp, Artificial sequence
  Synthetic oligonucleotide
ccttactgcacttgagctcc

SEQ ID NO: 3732 - DNA, 20 bp, Artificial sequence
  Synthetic oligonucleotide
tgttgcctaccatattgctt

SEQ ID NO: 3733 - DNA, 20 bp, Artificial sequence
  Synthetic oligonucleotide
cccaccatcactatgacctc

SEQ ID NO: 3734 - DNA, 20 bp, Artificial sequence
  Synthetic oligonucleotide
cagtcagccaaattcccttt

SEQ ID NO: 3735 - DNA, 20 bp, Artificial sequence
  Synthetic oligonucleotide
ctaacaagatcacatctccc

SEQ ID NO: 3736 - DNA, 20 bp, Artificial sequence
  Synthetic oligonucleotide
tgtttccccactcctactct

SEQ ID NO: 3737 - DNA, 20 bp, Artificial sequence
  Synthetic oligonucleotide
gagcacccattccataccac

SEQ ID NO: 3738 - DNA, 20 bp, Artificial sequence
  Synthetic oligonucleotide
atctaaacatatacatgtgt

SEQ ID NO: 3739 - DNA, 20 bp, Artificial sequence
  Synthetic oligonucleotide
gggctttcttggcatactca

SEQ ID NO: 3740 - DNA, 20 bp, Artificial sequence
  Synthetic oligonucleotide
tgggactcaatctttccctt

SEQ ID NO: 3741 - DNA, 20 bp, Artificial sequence
  Synthetic oligonucleotide
acgctcctctctttcttgga

SEQ ID NO: 3742 - DNA, 20 bp, Artificial sequence
  Synthetic oligonucleotide
caccatgtgattccctgatt

SEQ ID NO: 3743 - DNA, 20 bp, Artificial sequence
  Synthetic oligonucleotide
gcttgcctgatcactatgtt

SEQ ID NO: 3744 - DNA, 20 bp, Artificial sequence
  Synthetic oligonucleotide
ttgcactgcactctaggtat

SEQ ID NO: 3745 - DNA, 20 bp, Artificial sequence
  Synthetic oligonucleotide
cttctatcatgccattcctt

SEQ ID NO: 3746 - DNA, 20 bp, Artificial sequence
  Synthetic oligonucleotide
cacttaatacatcatgcctt

SEQ ID NO: 3747 - DNA, 20 bp, Artificial sequence
  Synthetic oligonucleotide
acagtttatttttagcagca

SEQ ID NO: 3748 - DNA, 20 bp, Artificial sequence
  Synthetic oligonucleotide
ccttgtttttccctcgagga

SEQ ID NO: 3749 - DNA, 20 bp, Artificial sequence
  Synthetic oligonucleotide
gcacaaggccacattttcaa

SEQ ID NO: 3750 - DNA, 20 bp, Artificial sequence
  Synthetic oligonucleotide
ctcacctcatctgcaggcta

SEQ ID NO: 3751 - DNA, 20 bp, Artificial sequence
  Synthetic oligonucleotide
agcttctatcactctcttgc

SEQ ID NO: 3752 - DNA, 20 bp, Artificial sequence
  Synthetic oligonucleotide
gctgcatcccttacactgtt

SEQ ID NO: 3753 - DNA, 20 bp, Artificial sequence
  Synthetic oligonucleotide
ttgcaggctactcttgaccc

SEQ ID NO: 3754 - DNA, 20 bp, Artificial sequence
  Synthetic oligonucleotide
ataagtttatttccagactc

SEQ ID NO: 3755 - DNA, 20 bp, Artificial sequence
  Synthetic oligonucleotide
tggctttttcattaaccacc

SEQ ID NO: 3756 - DNA, 20 bp, Artificial sequence
  Synthetic oligonucleotide
gcatatatatttatataaac

SEQ ID NO: 3757 - DNA, 20 bp, Artificial sequence
  Synthetic oligonucleotide
actcaccaacaacatctggc

SEQ ID NO: 3758 - DNA, 20 bp, Artificial sequence
  Synthetic oligonucleotide
ctgtcttacttattattggc

SEQ ID NO: 3759 - DNA, 20 bp, Artificial sequence
  Synthetic oligonucleotide
atcaacttactagctggtca

SEQ ID NO: 3760 - DNA, 20 bp, Artificial sequence
  Synthetic oligonucleotide
atatctatatgctacccact

SEQ ID NO: 3761 - DNA, 20 bp, Artificial sequence
  Synthetic oligonucleotide
acttaactttgttcctggct

SEQ ID NO: 3762 - DNA, 20 bp, Artificial sequence
  Synthetic oligonucleotide
gctacaagtaccaagtagcc

SEQ ID NO: 3763 - DNA, 20 bp, Artificial sequence
  Synthetic oligonucleotide
actcgagtaatgttccagtc

SEQ ID NO: 3764 - DNA, 20 bp, Artificial sequence
  Synthetic oligonucleotide
ccctcctagactatactggt

SEQ ID NO: 3765 - DNA, 20 bp, Artificial sequence
  Synthetic oligonucleotide
ttagcaaaatgaatccaaca

SEQ ID NO: 3766 - DNA, 20 bp, Artificial sequence
  Synthetic oligonucleotide
cctggcttcaataagttact

SEQ ID NO: 3767 - DNA, 20 bp, Artificial sequence
  Synthetic oligonucleotide
ggtcacctcaactcttggcc

SEQ ID NO: 3768 - DNA, 20 bp, Artificial sequence
  Synthetic oligonucleotide
gtcctagtaaccagaccacc

SEQ ID NO: 3769 - DNA, 20 bp, Artificial sequence
  Synthetic oligonucleotide
cctagctctttaattcctcc

SEQ ID NO: 3770 - DNA, 20 bp, Artificial sequence
  Synthetic oligonucleotide
acagacatgctacctcatca

SEQ ID NO: 3771 - DNA, 20 bp, Artificial sequence
  Synthetic oligonucleotide
ctgtgtgatatgtatcacac

SEQ ID NO: 3772 - DNA, 20 bp, Artificial sequence
  Synthetic oligonucleotide
agcttaccaattgcatgatc

SEQ ID NO: 3773 - DNA, 20 bp, Artificial sequence
  Synthetic oligonucleotide
tatccatgccatcaaacagc

SEQ ID NO: 3774 - DNA, 20 bp, Artificial sequence
  Synthetic oligonucleotide
catagcggttctcttcacca

SEQ ID NO: 3775 - DNA, 20 bp, Artificial sequence
  Synthetic oligonucleotide
gttgcctgctcatgctggca

SEQ ID NO: 3776 - DNA, 20 bp, Artificial sequence
  Synthetic oligonucleotide
gctcacttgagatcctctat

SEQ ID NO: 3777 - DNA, 20 bp, Artificial sequence
  Synthetic oligonucleotide
tcgaatctcagattcagacc

SEQ ID NO: 3778 - DNA, 20 bp, Artificial sequence
  Synthetic oligonucleotide
cttgggcttttcctgtggca

SEQ ID NO: 3779 - DNA, 20 bp, Artificial sequence
  Synthetic oligonucleotide
gagcatcatcatattagcca

SEQ ID NO: 3780 - DNA, 20 bp, Artificial sequence
  Synthetic oligonucleotide
acttagttactccaagctct

SEQ ID NO: 3781 - DNA, 20 bp, Artificial sequence
  Synthetic oligonucleotide
gcaagcttcctctttaaggg

SEQ ID NO: 3782 - DNA, 20 bp, Artificial sequence
  Synthetic oligonucleotide
tttccttgcaactatggcca

SEQ ID NO: 3783 - DNA, 20 bp, Artificial sequence
  Synthetic oligonucleotide
atggagtctgttcctagtcc

SEQ ID NO: 3784 - DNA, 20 bp, Artificial sequence
  Synthetic oligonucleotide
gcacagacaaagcatctcca

SEQ ID NO: 3785 - DNA, 20 bp, Artificial sequence
  Synthetic oligonucleotide
aggctgctcccactgttctc

SEQ ID NO: 3786 - DNA, 20 bp, Artificial sequence
  Synthetic oligonucleotide
agtgcttttaaaaattatga

SEQ ID NO: 3787 - DNA, 20 bp, Artificial sequence
  Synthetic oligonucleotide
gcacttgccctctgactcct

SEQ ID NO: 3788 - DNA, 20 bp, Artificial sequence
  Synthetic oligonucleotide
gcctttctttgactctctcc

SEQ ID NO: 3789 - DNA, 20 bp, Artificial sequence
  Synthetic oligonucleotide
gtgctactgctactatgcac

SEQ ID NO: 3790 - DNA, 20 bp, Artificial sequence
  Synthetic oligonucleotide
tgggtatgatacttagcctt

SEQ ID NO: 3791 - DNA, 20 bp, Artificial sequence
  Synthetic oligonucleotide
tgcagatttaacttttgact

SEQ ID NO: 3792 - DNA, 20 bp, Artificial sequence
  Synthetic oligonucleotide
taacaagatcacatctccct

SEQ ID NO: 3793 - DNA, 20 bp, Artificial sequence
  Synthetic oligonucleotide
ctagagctcactgaaggtcc

SEQ ID NO: 3794 - DNA, 20 bp, Artificial sequence
  Synthetic oligonucleotide
tacacatacctctctctggt

SEQ ID NO: 3795 - DNA, 20 bp, Artificial sequence
  Synthetic oligonucleotide
agctgtccctgattcccctc

SEQ ID NO: 3796 - DNA, 20 bp, Artificial sequence
  Synthetic oligonucleotide
tgccttatctttcctaagat

SEQ ID NO: 3797 - DNA, 20 bp, Artificial sequence
  Synthetic oligonucleotide
tagcggcactgactcctctt

SEQ ID NO: 3798 - DNA, 20 bp, Artificial sequence
  Synthetic oligonucleotide
tgtagtttttcactctagac

SEQ ID NO: 3799 - DNA, 20 bp, Artificial sequence
  Synthetic oligonucleotide
tccaggccataacagttggc

SEQ ID NO: 3800 - DNA, 20 bp, Artificial sequence
  Synthetic oligonucleotide
accaatccctatgttcatat

SEQ ID NO: 3801 - DNA, 20 bp, Artificial sequence
  Synthetic oligonucleotide
caacagctttccatctggtc

SEQ ID NO: 3802 - DNA, 20 bp, Artificial sequence
  Synthetic oligonucleotide
accttaatgcctctcagctc

SEQ ID NO: 3803 - DNA, 20 bp, Artificial sequence
  Synthetic oligonucleotide
atctgcagcatacacatcta

SEQ ID NO: 3804 - DNA, 20 bp, Artificial sequence
  Synthetic oligonucleotide
tctctggctacacctccttt

SEQ ID NO: 3805 - DNA, 20 bp, Artificial sequence
  Synthetic oligonucleotide
tctgataattatatagtctc

SEQ ID NO: 3806 - DNA, 20 bp, Artificial sequence
  Synthetic oligonucleotide
gctgggctttattcttcatt

SEQ ID NO: 3807 - DNA, 20 bp, Artificial sequence
  Synthetic oligonucleotide
gaggtattttttcaatagca

SEQ ID NO: 3808 - DNA, 20 bp, Artificial sequence
  Synthetic oligonucleotide
cccactcctactctaagtac

SEQ ID NO: 3809 - DNA, 20 bp, Artificial sequence
  Synthetic oligonucleotide
gtcaattcataaccagcata

SEQ ID NO: 3810 - DNA, 20 bp, Artificial sequence
  Synthetic oligonucleotide
ccacactaggtataatgacc

SEQ ID NO: 3811 - DNA, 20 bp, Artificial sequence
  Synthetic oligonucleotide
gttcacctgattcacctgaa

SEQ ID NO: 3812 - DNA, 20 bp, Artificial sequence
  Synthetic oligonucleotide
tctgattgttctgaagggcc

SEQ ID NO: 3813 - DNA, 20 bp, Artificial sequence
  Synthetic oligonucleotide
gtagctcagatattctgtac

SEQ ID NO: 3814 - DNA, 20 bp, Artificial sequence
  Synthetic oligonucleotide
agggaaggttcttaatggca

SEQ ID NO: 3815 - DNA, 20 bp, Artificial sequence
  Synthetic oligonucleotide
agtttatttccagactctga

SEQ ID NO: 3816 - DNA, 20 bp, Artificial sequence
  Synthetic oligonucleotide
atgctacccactgtttggta

SEQ ID NO: 3817 - DNA, 20 bp, Artificial sequence
  Synthetic oligonucleotide
tcttacttattattggccct

SEQ ID NO: 3818 - DNA, 20 bp, Artificial sequence
  Synthetic oligonucleotide
acccattccataccacatgc

SEQ ID NO: 3819 - DNA, 20 bp, Artificial sequence
  Synthetic oligonucleotide
ctgcagcatacacatctatc

SEQ ID NO: 3820 - DNA, 20 bp, Artificial sequence
  Synthetic oligonucleotide
tgtgattccctgatttcctc

SEQ ID NO: 3821 - DNA, 20 bp, Artificial sequence
  Synthetic oligonucleotide
cgtactgtttccctttgcct

SEQ ID NO: 3822 - DNA, 20 bp, Artificial sequence
  Synthetic oligonucleotide
tagcattctaatgatcactt

SEQ ID NO: 3823 - DNA, 20 bp, Artificial sequence
  Synthetic oligonucleotide
cggcactgactcctcttctt

SEQ ID NO: 3824 - DNA, 20 bp, Artificial sequence
  Synthetic oligonucleotide
gaatcattttttgaccttga

SEQ ID NO: 3825 - DNA, 20 bp, Artificial sequence
  Synthetic oligonucleotide
gctcaggtctgccttagcct

SEQ ID NO: 3826 - DNA, 20 bp, Artificial sequence
  Synthetic oligonucleotide
ttttcactctagacttgttt

SEQ ID NO: 3827 - DNA, 20 bp, Artificial sequence
  Synthetic oligonucleotide
ctagctctttaattcctccc

SEQ ID NO: 3828 - DNA, 20 bp, Artificial sequence
  Synthetic oligonucleotide
tgcatcccttacactgttgt

SEQ ID NO: 3829 - DNA, 20 bp, Artificial sequence
  Synthetic oligonucleotide
ggtacacttcatcagatatc

SEQ ID NO: 3830 - DNA, 20 bp, Artificial sequence
  Synthetic oligonucleotide
taaacatatacatgtgcata

SEQ ID NO: 3831 - DNA, 20 bp, Artificial sequence
  Synthetic oligonucleotide
tctaaacatatacatgtgta

SEQ ID NO: 3832 - DNA, 20 bp, Artificial sequence
  Synthetic oligonucleotide
gcatacataccttcacctgg

SEQ ID NO: 3833 - DNA, 20 bp, Artificial sequence
  Synthetic oligonucleotide
acacagatgcaatttcactc

SEQ ID NO: 3834 - DNA, 20 bp, Artificial sequence
  Synthetic oligonucleotide
gaggctttctcatttgctgc

SEQ ID NO: 3835 - DNA, 20 bp, Artificial sequence
  Synthetic oligonucleotide
ctgcaagcacaactttgaca

SEQ ID NO: 3836 - DNA, 20 bp, Artificial sequence
  Synthetic oligonucleotide
acacatacctctctctggtc

SEQ ID NO: 3837 - DNA, 20 bp, Artificial sequence
  Synthetic oligonucleotide
cagatttaacttttgacttc

SEQ ID NO: 3838 - DNA, 20 bp, Artificial sequence
  Synthetic oligonucleotide
caaaatgaatccaacaatgt

SEQ ID NO: 3839 - DNA, 20 bp, Artificial sequence
  Synthetic oligonucleotide
tggtattttatatcagccaa

SEQ ID NO: 3840 - DNA, 20 bp, Artificial sequence
  Synthetic oligonucleotide
tgctactgctactatgcacc

SEQ ID NO: 3841 - DNA, 20 bp, Artificial sequence
  Synthetic oligonucleotide
gcttctatcactctcttgct

SEQ ID NO: 3842 - DNA, 20 bp, Artificial sequence
  Synthetic oligonucleotide
atccatgccatcaaacagct

SEQ ID NO: 3843 - DNA, 20 bp, Artificial sequence
  Synthetic oligonucleotide
tgccaatatgaacacatgac

SEQ ID NO: 3844 - DNA, 20 bp, Artificial sequence
  Synthetic oligonucleotide
agcaaccttgaaccagcacc

SEQ ID NO: 3845 - DNA, 20 bp, Artificial sequence
  Synthetic oligonucleotide
ctcagtgctttgctttggca

SEQ ID NO: 3846 - DNA, 20 bp, Artificial sequence
  Synthetic oligonucleotide
ggtttattcactaattgact

SEQ ID NO: 3847 - DNA, 20 bp, Artificial sequence
  Synthetic oligonucleotide
gctgtccctgattcccctcc

SEQ ID NO: 3848 - DNA, 20 bp, Artificial sequence
  Synthetic oligonucleotide
gccttctacaggaatccata

SEQ ID NO: 3849 - DNA, 20 bp, Artificial sequence
  Synthetic oligonucleotide
tcctagtaaccagaccacca

SEQ ID NO: 3850 - DNA, 20 bp, Artificial sequence
  Synthetic oligonucleotide
agatcattagactattttgc

SEQ ID NO: 3851 - DNA, 20 bp, Artificial sequence
  Synthetic oligonucleotide
cgctcctctctttcttggac

SEQ ID NO: 3852 - DNA, 20 bp, Artificial sequence
  Synthetic oligonucleotide
ggctttttcattaaccacct

SEQ ID NO: 3853 - DNA, 20 bp, Artificial sequence
  Synthetic oligonucleotide
gccacatcttttcttgtagc

SEQ ID NO: 3854 - DNA, 20 bp, Artificial sequence
  Synthetic oligonucleotide
cagacatgctacctcatcac

SEQ ID NO: 3855 - DNA, 20 bp, Artificial sequence
  Synthetic oligonucleotide
gctcagatattctgtacgac

SEQ ID NO: 3856 - DNA, 20 bp, Artificial sequence
  Synthetic oligonucleotide
gtgcttttaaaaattatgat

SEQ ID NO: 3857 - DNA, 20 bp, Artificial sequence
  Synthetic oligonucleotide
gctttcttggcatactcagt

SEQ ID NO: 3858 - DNA, 20 bp, Artificial sequence
  Synthetic oligonucleotide
atgcaattcacccacttgga

SEQ ID NO: 3859 - DNA, 20 bp, Artificial sequence
  Synthetic oligonucleotide
tgcaggctactcttgaccca

SEQ ID NO: 3860 - DNA, 20 bp, Artificial sequence
  Synthetic oligonucleotide
tccaattcacagcttaggga

SEQ ID NO: 3861 - DNA, 20 bp, Artificial sequence
  Synthetic oligonucleotide
tagcggttctcttcaccatc

SEQ ID NO: 3862 - DNA, 20 bp, Artificial sequence
  Synthetic oligonucleotide
agccactgaataaacttggt

SEQ ID NO: 3863 - DNA, 20 bp, Artificial sequence
  Synthetic oligonucleotide
ctgataattatatagtctca

SEQ ID NO: 3864 - DNA, 20 bp, Artificial sequence
  Synthetic oligonucleotide
tccctatgttcatatactac

SEQ ID NO: 3865 - DNA, 20 bp, Artificial sequence
  Synthetic oligonucleotide
gcttaccaattgcatgatct

SEQ ID NO: 3866 - DNA, 20 bp, Artificial sequence
  Synthetic oligonucleotide
tttaatctcaaattttgctt

SEQ ID NO: 3867 - DNA, 20 bp, Artificial sequence
  Synthetic oligonucleotide
ccactcctactctaagtacc

SEQ ID NO: 3868 - DNA, 20 bp, Artificial sequence
  Synthetic oligonucleotide
gcagtgatactacaacagca

SEQ ID NO: 3869 - DNA, 20 bp, Artificial sequence
  Synthetic oligonucleotide
tcgctttctaaagctttcct

SEQ ID NO: 3870 - DNA, 20 bp, Artificial sequence
  Synthetic oligonucleotide
gtcaaagatctatttcctaa

SEQ ID NO: 3871 - DNA, 20 bp, Artificial sequence
  Synthetic oligonucleotide
agatcacatctccctgtggc

SEQ ID NO: 3872 - DNA, 20 bp, Artificial sequence
  Synthetic oligonucleotide
acatcatgcctttaagtcca

SEQ ID NO: 3873 - DNA, 20 bp, Artificial sequence
  Synthetic oligonucleotide
tggcagagtaacccagccaa

SEQ ID NO: 3874 - DNA, 20 bp, Artificial sequence
  Synthetic oligonucleotide
tcggaggtcctcccgctgct

SEQ ID NO: 3875 - DNA, 20 bp, Artificial sequence
  Synthetic oligonucleotide
gcccaatgtttcagtcagaa

SEQ ID NO: 3876 - DNA, 20 bp, Artificial sequence
  Synthetic oligonucleotide
gtatgtgaatgacttctgca

SEQ ID NO: 3877 - DNA, 20 bp, Artificial sequence
  Synthetic oligonucleotide
tcctagtcctttaagtacct

SEQ ID NO: 3878 - DNA, 20 bp, Artificial sequence
  Synthetic oligonucleotide
cctcctagactatactggta

SEQ ID NO: 3879 - DNA, 20 bp, Artificial sequence
  Synthetic oligonucleotide
aggcgatcctcccctacctc

SEQ ID NO: 3880 - DNA, 20 bp, Artificial sequence
  Synthetic oligonucleotide
tggctgtttccacttgagtt

SEQ ID NO: 3881 - DNA, 20 bp, Artificial sequence
  Synthetic oligonucleotide
actcatattcctaacacggc

SEQ ID NO: 3882 - DNA, 20 bp, Artificial sequence
  Synthetic oligonucleotide
ctggcttcaataagttactt

SEQ ID NO: 3883 - DNA, 20 bp, Artificial sequence
  Synthetic oligonucleotide
agtgcttccatatatgatat

SEQ ID NO: 3884 - DNA, 20 bp, Artificial sequence
  Synthetic oligonucleotide
aacctcttcaaaaagactgc

SEQ ID NO: 3885 - DNA, 20 bp, Artificial sequence
  Synthetic oligonucleotide
aatgcctctcagctcatcta

SEQ ID NO: 3886 - DNA, 20 bp, Artificial sequence
  Synthetic oligonucleotide
attggtacatattccagggc

SEQ ID NO: 3887 - DNA, 20 bp, Artificial sequence
  Synthetic oligonucleotide
atctggctagaattcatgct

SEQ ID NO: 3888 - DNA, 20 bp, Artificial sequence
  Synthetic oligonucleotide
gccttatctttcctaagata

SEQ ID NO: 3889 - DNA, 20 bp, Artificial sequence
  Synthetic oligonucleotide
gctacacctcctttgttggt

SEQ ID NO: 3890 - DNA, 20 bp, Artificial sequence
  Synthetic oligonucleotide
aaccacaatctagcagcctt

SEQ ID NO: 3891 - DNA, 20 bp, Artificial sequence
  Synthetic oligonucleotide
atacatgtgcatatttatat

SEQ ID NO: 3892 - DNA, 20 bp, Artificial sequence
  Synthetic oligonucleotide
atctcaaattttgcttggac

SEQ ID NO: 3893 - DNA, 20 bp, Artificial sequence
  Synthetic oligonucleotide
ataaattgatattaccattt

SEQ ID NO: 3894 - DNA, 20 bp, Artificial sequence
  Synthetic oligonucleotide
tccatgccatcaaacagctt

SEQ ID NO: 3895 - DNA, 20 bp, Artificial sequence
  Synthetic oligonucleotide
cccggtctcatattttcttc

SEQ ID NO: 3896 - DNA, 20 bp, Artificial sequence
  Synthetic oligonucleotide
gtgattccctgatttcctct

SEQ ID NO: 3897 - DNA, 20 bp, Artificial sequence
  Synthetic oligonucleotide
agctcatctaaaaagttccc

SEQ ID NO: 3898 - DNA, 20 bp, Artificial sequence
  Synthetic oligonucleotide
tgcttttaaaaattatgata

SEQ ID NO: 3899 - DNA, 20 bp, Artificial sequence
  Synthetic oligonucleotide
tgcagcatacacatctatct

SEQ ID NO: 3900 - DNA, 20 bp, Artificial sequence
  Synthetic oligonucleotide
agcggttctcttcaccatca

SEQ ID NO: 3901 - DNA, 20 bp, Artificial sequence
  Synthetic oligonucleotide
ccctatgttcatatactact

SEQ ID NO: 3902 - DNA, 20 bp, Artificial sequence
  Synthetic oligonucleotide
ttgcatgatctataccgact

SEQ ID NO: 3903 - DNA, 20 bp, Artificial sequence
  Synthetic oligonucleotide
gccacatgttgcattgacct

SEQ ID NO: 3904 - DNA, 20 bp, Artificial sequence
  Synthetic oligonucleotide
ttaagaccttattttctttt

SEQ ID NO: 3905 - DNA, 20 bp, Artificial sequence
  Synthetic oligonucleotide
cacagatgcaatttcactca

SEQ ID NO: 3906 - DNA, 20 bp, Artificial sequence
  Synthetic oligonucleotide
cacatcttttcttgtagctc

SEQ ID NO: 3907 - DNA, 20 bp, Artificial sequence
  Synthetic oligonucleotide
agctcacctaatgttctccc

SEQ ID NO: 3908 - DNA, 20 bp, Artificial sequence
  Synthetic oligonucleotide
tggcactcatcacagtctgc

SEQ ID NO: 3909 - DNA, 20 bp, Artificial sequence
  Synthetic oligonucleotide
ggtccatccctattactttt

SEQ ID NO: 3910 - DNA, 20 bp, Artificial sequence
  Synthetic oligonucleotide
aaaatgaatccaacaatgta

SEQ ID NO: 3911 - DNA, 20 bp, Artificial sequence
  Synthetic oligonucleotide
tgcctactatatgatagctc

SEQ ID NO: 3912 - DNA, 20 bp, Artificial sequence
  Synthetic oligonucleotide
ggagcatagacacattccac

SEQ ID NO: 3913 - DNA, 20 bp, Artificial sequence
  Synthetic oligonucleotide
tttcttggcatactcagtaa

SEQ ID NO: 3914 - DNA, 20 bp, Artificial sequence
  Synthetic oligonucleotide
tcatgcctttaagtccagtt

SEQ ID NO: 3915 - DNA, 20 bp, Artificial sequence
  Synthetic oligonucleotide
ctcagctcactgcctttatc

SEQ ID NO: 3916 - DNA, 20 bp, Artificial sequence
  Synthetic oligonucleotide
gttggctaaatccaacttct

SEQ ID NO: 3917 - DNA, 20 bp, Artificial sequence
  Synthetic oligonucleotide
gctactgctactatgcaccc

SEQ ID NO: 3918 - DNA, 20 bp, Artificial sequence
  Synthetic oligonucleotide
gcattctaatgatcacttgc

SEQ ID NO: 3919 - DNA, 20 bp, Artificial sequence
  Synthetic oligonucleotide
ctaaacatatacatgtgtat

SEQ ID NO: 3920 - DNA, 20 bp, Artificial sequence
  Synthetic oligonucleotide
gtgactgatgtctttcaact

SEQ ID NO: 3921 - DNA, 20 bp, Artificial sequence
  Synthetic oligonucleotide
tccataccacatgcggagct

SEQ ID NO: 3922 - DNA, 20 bp, Artificial sequence
  Synthetic oligonucleotide
gccaatatgaacacatgact

SEQ ID NO: 3923 - DNA, 20 bp, Artificial sequence
  Synthetic oligonucleotide
atgatcttggtccaatgcct

SEQ ID NO: 3924 - DNA, 20 bp, Artificial sequence
  Synthetic oligonucleotide
tccaatgtaaagctaaggtt

SEQ ID NO: 3925 - DNA, 20 bp, Artificial sequence
  Synthetic oligonucleotide
catcccttacactgttgtcc

SEQ ID NO: 3926 - DNA, 20 bp, Artificial sequence
  Synthetic oligonucleotide
aagcacctctgagccctgcc

SEQ ID NO: 3927 - DNA, 20 bp, Artificial sequence
  Synthetic oligonucleotide
tcctactctaagtaccactc

SEQ ID NO: 3928 - DNA, 20 bp, Artificial sequence
  Synthetic oligonucleotide
ataataccatagtcattcat

SEQ ID NO: 3929 - DNA, 20 bp, Artificial sequence
  Synthetic oligonucleotide
cacatacctctctctggtct

SEQ ID NO: 3930 - DNA, 20 bp, Artificial sequence
  Synthetic oligonucleotide
gtttccctttgccttcacct

SEQ ID NO: 3931 - DNA, 20 bp, Artificial sequence
  Synthetic oligonucleotide
ttggttcgctaaactgcatc

SEQ ID NO: 3932 - DNA, 20 bp, Artificial sequence
  Synthetic oligonucleotide
tcagtgctttgctttggcat

SEQ ID NO: 3933 - DNA, 20 bp, Artificial sequence
  Synthetic oligonucleotide
tgctacccactgtttggtat

SEQ ID NO: 3934 - DNA, 20 bp, Artificial sequence
  Synthetic oligonucleotide
agacatgctacctcatcact

SEQ ID NO: 3935 - DNA, 20 bp, Artificial sequence
  Synthetic oligonucleotide
gctcctctctttcttggaca

SEQ ID NO: 3936 - DNA, 20 bp, Artificial sequence
  Synthetic oligonucleotide
aggcctttctagattcacta

SEQ ID NO: 3937 - DNA, 20 bp, Artificial sequence
  Synthetic oligonucleotide
gctttttcattaaccacctc

SEQ ID NO: 3938 - DNA, 20 bp, Artificial sequence
  Synthetic oligonucleotide
gatttaacttttgacttcgc

SEQ ID NO: 3939 - DNA, 20 bp, Artificial sequence
  Synthetic oligonucleotide
agcctatgctaaccacttcc

SEQ ID NO: 3940 - DNA, 20 bp, Artificial sequence
  Synthetic oligonucleotide
gactcatttttgctatgact

SEQ ID NO: 3941 - DNA, 20 bp, Artificial sequence
  Synthetic oligonucleotide
gcaggctactcttgacccat

SEQ ID NO: 3942 - DNA, 20 bp, Artificial sequence
  Synthetic oligonucleotide
agccctttgaatttcagact

SEQ ID NO: 3943 - DNA, 20 bp, Artificial sequence
  Synthetic oligonucleotide
cctcttcaaaaagactgcct

SEQ ID NO: 3944 - DNA, 20 bp, Artificial sequence
  Synthetic oligonucleotide
ctccatattactctaaccct

SEQ ID NO: 3945 - DNA, 20 bp, Artificial sequence
  Synthetic oligonucleotide
atagtctcacagttatcact

SEQ ID NO: 3946 - DNA, 20 bp, Artificial sequence
  Synthetic oligonucleotide
tagctctttaattcctcccc

SEQ ID NO: 3947 - DNA, 20 bp, Artificial sequence
  Synthetic oligonucleotide
gcaaccttgaaccagcacca

SEQ ID NO: 3948 - DNA, 20 bp, Artificial sequence
  Synthetic oligonucleotide
ggttatttacaacctcacat

SEQ ID NO: 3949 - DNA, 20 bp, Artificial sequence
  Synthetic oligonucleotide
gcccaaatatcaacccactt

SEQ ID NO: 3950 - DNA, 20 bp, Artificial sequence
  Synthetic oligonucleotide
gcttccatatatgatatggt

SEQ ID NO: 3951 - DNA, 20 bp, Artificial sequence
  Synthetic oligonucleotide
ggcgatcctcccctacctca

SEQ ID NO: 3952 - DNA, 20 bp, Artificial sequence
  Synthetic oligonucleotide
ctagtaaccagaccaccagt

SEQ ID NO: 3953 - DNA, 20 bp, Artificial sequence
  Synthetic oligonucleotide
cccaatgtttcagtcagaac

SEQ ID NO: 3954 - DNA, 20 bp, Artificial sequence
  Synthetic oligonucleotide
gatgaacttgccttctacta

SEQ ID NO: 3955 - DNA, 20 bp, Artificial sequence
  Synthetic oligonucleotide
gtacacttcatcagatatcc

SEQ ID NO: 3956 - DNA, 20 bp, Artificial sequence
  Synthetic oligonucleotide
actgtgcaactaccacaggc

SEQ ID NO: 3957 - DNA, 20 bp, Artificial sequence
  Synthetic oligonucleotide
tccaaccttactcatcatct

SEQ ID NO: 3958 - DNA, 20 bp, Artificial sequence
  Synthetic oligonucleotide
agcagctatactcttaactt

SEQ ID NO: 3959 - DNA, 20 bp, Artificial sequence
  Synthetic oligonucleotide
atcacattgatcacatgtct

SEQ ID NO: 3960 - DNA, 20 bp, Artificial sequence
  Synthetic oligonucleotide
agtagctgtacttactgcca

SEQ ID NO: 3961 - DNA, 20 bp, Artificial sequence
  Synthetic oligonucleotide
cactaattgactcatccaat

SEQ ID NO: 3962 - DNA, 20 bp, Artificial sequence
  Synthetic oligonucleotide
gcctaatttcctaaagcagt

SEQ ID NO: 3963 - DNA, 20 bp, Artificial sequence
  Synthetic oligonucleotide
ggtgtctctcaaaattctgt

SEQ ID NO: 3964 - DNA, 20 bp, Artificial sequence
  Synthetic oligonucleotide
tgttcttgctgacacccaac

SEQ ID NO: 3965 - DNA, 20 bp, Artificial sequence
  Synthetic oligonucleotide
ccttctacaggaatccatac

SEQ ID NO: 3966 - DNA, 20 bp, Artificial sequence
  Synthetic oligonucleotide
cgctttctaaagctttcctc

SEQ ID NO: 3967 - DNA, 20 bp, Artificial sequence
  Synthetic oligonucleotide
gccaaactagtttctgcttc

SEQ ID NO: 3968 - DNA, 20 bp, Artificial sequence
  Synthetic oligonucleotide
acattccaatagagacccct

SEQ ID NO: 3969 - DNA, 20 bp, Artificial sequence
  Synthetic oligonucleotide
cctgcatattacatgtcaaa

SEQ ID NO: 3970 - DNA, 20 bp, Artificial sequence
  Synthetic oligonucleotide
actgatgtctttcaactacc

SEQ ID NO: 3971 - DNA, 20 bp, Artificial sequence
  Synthetic oligonucleotide
gtctcacagttatcacttca

SEQ ID NO: 3972 - DNA, 20 bp, Artificial sequence
  Synthetic oligonucleotide
tggcacaattatgactgtca

SEQ ID NO: 3973 - DNA, 20 bp, Artificial sequence
  Synthetic oligonucleotide
atttcctctagaaagcacca

SEQ ID NO: 3974 - DNA, 20 bp, Artificial sequence
  Synthetic oligonucleotide
atcaacccacttcatcactt

SEQ ID NO: 3975 - DNA, 20 bp, Artificial sequence
  Synthetic oligonucleotide
aaaatttaccattttagcat

SEQ ID NO: 3976 - DNA, 20 bp, Artificial sequence
  Synthetic oligonucleotide
ctgccctactctcagctctc

SEQ ID NO: 3977 - DNA, 20 bp, Artificial sequence
  Synthetic oligonucleotide
gctgtactttttaaacctca

SEQ ID NO: 3978 - DNA, 20 bp, Artificial sequence
  Synthetic oligonucleotide
tgcttggactttattcctgt

SEQ ID NO: 3979 - DNA, 20 bp, Artificial sequence
  Synthetic oligonucleotide
atccatcctttcgactcgaa

SEQ ID NO: 3980 - DNA, 20 bp, Artificial sequence
  Synthetic oligonucleotide
gttcatatactactgatgga

SEQ ID NO: 3981 - DNA, 20 bp, Artificial sequence
  Synthetic oligonucleotide
acatcttttcttgtagctcc

SEQ ID NO: 3982 - DNA, 20 bp, Artificial sequence
  Synthetic oligonucleotide
ccgtcttttcccttctcata

SEQ ID NO: 3983 - DNA, 20 bp, Artificial sequence
  Synthetic oligonucleotide
ccatgccatcaaacagctta

SEQ ID NO: 3984 - DNA, 20 bp, Artificial sequence
  Synthetic oligonucleotide
gacatgctacctcatcactc

SEQ ID NO: 3985 - DNA, 20 bp, Artificial sequence
  Synthetic oligonucleotide
caggctactcttgacccata

SEQ ID NO: 3986 - DNA, 20 bp, Artificial sequence
  Synthetic oligonucleotide
gcctactatatgatagctcc

SEQ ID NO: 3987 - DNA, 20 bp, Artificial sequence
  Synthetic oligonucleotide
catgtgtatgtatatttatc

SEQ ID NO: 3988 - DNA, 20 bp, Artificial sequence
  Synthetic oligonucleotide
atgttaatctcagcttcggc

SEQ ID NO: 3989 - DNA, 20 bp, Artificial sequence
  Synthetic oligonucleotide
acacttcatcagatatcctt

SEQ ID NO: 3990 - DNA, 20 bp, Artificial sequence
  Synthetic oligonucleotide
ccggtctcatattttcttct

SEQ ID NO: 3991 - DNA, 20 bp, Artificial sequence
  Synthetic oligonucleotide
gcctatgctaaccacttccc

SEQ ID NO: 3992 - DNA, 20 bp, Artificial sequence
  Synthetic oligonucleotide
gcggttctcttcaccatcac

SEQ ID NO: 3993 - DNA, 20 bp, Artificial sequence
  Synthetic oligonucleotide
gtgcttatgccaattccaca

SEQ ID NO: 3994 - DNA, 20 bp, Artificial sequence
  Synthetic oligonucleotide
gttaaattccctgattctgc

SEQ ID NO: 3995 - DNA, 20 bp, Artificial sequence
  Synthetic oligonucleotide
tgccttctaaagttctacat

SEQ ID NO: 3996 - DNA, 20 bp, Artificial sequence
  Synthetic oligonucleotide
gtgcaactaccacaggcaca

SEQ ID NO: 3997 - DNA, 20 bp, Artificial sequence
  Synthetic oligonucleotide
gtagctgtacttactgccat

SEQ ID NO: 3998 - DNA, 20 bp, Artificial sequence
  Synthetic oligonucleotide
gttcctcgaattcctcctgc

SEQ ID NO: 3999 - DNA, 20 bp, Artificial sequence
  Synthetic oligonucleotide
ccataccacatgcggagcta

SEQ ID NO: 4000 - DNA, 20 bp, Artificial sequence
  Synthetic oligonucleotide
aattgatattaccatttcta

SEQ ID NO: 4001 - DNA, 20 bp, Artificial sequence
  Synthetic oligonucleotide
aaatgaatccaacaatgtat

SEQ ID NO: 4002 - DNA, 20 bp, Artificial sequence
  Synthetic oligonucleotide
gttggttcgctaaactgcat

SEQ ID NO: 4003 - DNA, 20 bp, Artificial sequence
  Synthetic oligonucleotide
tttaacttttgacttcgctt

SEQ ID NO: 4004 - DNA, 20 bp, Artificial sequence
  Synthetic oligonucleotide
tacacatctatctttgagga

SEQ ID NO: 4005 - DNA, 20 bp, Artificial sequence
  Synthetic oligonucleotide
ccatgttatcaatactaggt

SEQ ID NO: 4006 - DNA, 20 bp, Artificial sequence
  Synthetic oligonucleotide
cttggcatactcagtaagaa

SEQ ID NO: 4007 - DNA, 20 bp, Artificial sequence
  Synthetic oligonucleotide
ggctgtccagaaatactgcc

SEQ ID NO: 4008 - DNA, 20 bp, Artificial sequence
  Synthetic oligonucleotide
aggtattactcatttgctct

SEQ ID NO: 4009 - DNA, 20 bp, Artificial sequence
  Synthetic oligonucleotide
tacatgtgcatatttatata

SEQ ID NO: 4010 - DNA, 20 bp, Artificial sequence
  Synthetic oligonucleotide
gtgtctctcaaaattctgtt

SEQ ID NO: 4011 - DNA, 20 bp, Artificial sequence
  Synthetic oligonucleotide
ataccatagtcattcatgtt

SEQ ID NO: 4012 - DNA, 20 bp, Artificial sequence
  Synthetic oligonucleotide
tccaaactttctgttcaagc

SEQ ID NO: 4013 - DNA, 20 bp, Artificial sequence
  Synthetic oligonucleotide
actcatttttgctatgactc

SEQ ID NO: 4014 - DNA, 20 bp, Artificial sequence
  Synthetic oligonucleotide
cttccatatatgatatggtt

SEQ ID NO: 4015 - DNA, 20 bp, Artificial sequence
  Synthetic oligonucleotide
gctgaagtccttatccctct

SEQ ID NO: 4016 - DNA, 20 bp, Artificial sequence
  Synthetic oligonucleotide
ttgctggatttcataggcct

SEQ ID NO: 4017 - DNA, 20 bp, Artificial sequence
  Synthetic oligonucleotide
gctcacctaatgttctcccc

SEQ ID NO: 4018 - DNA, 20 bp, Artificial sequence
  Synthetic oligonucleotide
cagatgcaatttcactcatt

SEQ ID NO: 4019 - DNA, 20 bp, Artificial sequence
  Synthetic oligonucleotide
ataaactgatcttatattta

SEQ ID NO: 4020 - DNA, 20 bp, Artificial sequence
  Synthetic oligonucleotide
tttggtatgccattccacat

SEQ ID NO: 4021 - DNA, 20 bp, Artificial sequence
  Synthetic oligonucleotide
tgtatactttatcaaactct

SEQ ID NO: 4022 - DNA, 20 bp, Artificial sequence
  Synthetic oligonucleotide
acatacctctctctggtctt

SEQ ID NO: 4023 - DNA, 20 bp, Artificial sequence
  Synthetic oligonucleotide
ggagctctttccacccatgt

SEQ ID NO: 4024 - DNA, 20 bp, Artificial sequence
  Synthetic oligonucleotide
ggcagtcaatttccgggaaa

SEQ ID NO: 4025 - DNA, 20 bp, Artificial sequence
  Synthetic oligonucleotide
gtccatccctattacttttc

SEQ ID NO: 4026 - DNA, 20 bp, Artificial sequence
  Synthetic oligonucleotide
gttgcattgacctaactgcc

SEQ ID NO: 4027 - DNA, 20 bp, Artificial sequence
  Synthetic oligonucleotide
gagtctacaagaccactgcc

SEQ ID NO: 4028 - DNA, 20 bp, Artificial sequence
  Synthetic oligonucleotide
taccttgtttaccatgactt

SEQ ID NO: 4029 - DNA, 20 bp, Artificial sequence
  Synthetic oligonucleotide
cagactaattaccaatactc

SEQ ID NO: 4030 - DNA, 20 bp, Artificial sequence
  Synthetic oligonucleotide
attgccactctgtcactgcc

SEQ ID NO: 4031 - DNA, 20 bp, Artificial sequence
  Synthetic oligonucleotide
gcagtttttcataaacaagc

SEQ ID NO: 4032 - DNA, 20 bp, Artificial sequence
  Synthetic oligonucleotide
aggtatgcacacatctgact

SEQ ID NO: 4033 - DNA, 20 bp, Artificial sequence
  Synthetic oligonucleotide
gcttcctaagaaaagcacgc

SEQ ID NO: 4034 - DNA, 20 bp, Artificial sequence
  Synthetic oligonucleotide
gtacattcctaaacctgtca

SEQ ID NO: 4035 - DNA, 20 bp, Artificial sequence
  Synthetic oligonucleotide
aagctttcctctcaaccatt

SEQ ID NO: 4036 - DNA, 20 bp, Artificial sequence
  Synthetic oligonucleotide
tgcatgatctataccgactt

SEQ ID NO: 4037 - DNA, 20 bp, Artificial sequence
  Synthetic oligonucleotide
ggtcatcttaactttcagta

SEQ ID NO: 4038 - DNA, 20 bp, Artificial sequence
  Synthetic oligonucleotide
ttgtattcttgctcctattc

SEQ ID NO: 4039 - DNA, 20 bp, Artificial sequence
  Synthetic oligonucleotide
cccaccgtttaatcactgta

SEQ ID NO: 4040 - DNA, 20 bp, Artificial sequence
  Synthetic oligonucleotide
cagaaagccatcttgtctgc

SEQ ID NO: 4041 - DNA, 20 bp, Artificial sequence
  Synthetic oligonucleotide
tcattcactattgccaggca

SEQ ID NO: 4042 - DNA, 20 bp, Artificial sequence
  Synthetic oligonucleotide
ctcctctctttcttggacaa

SEQ ID NO: 4043 - DNA, 20 bp, Artificial sequence
  Synthetic oligonucleotide
caccacctccttgtttccta

SEQ ID NO: 4044 - DNA, 20 bp, Artificial sequence
  Synthetic oligonucleotide
acttgccttctactatgaca

SEQ ID NO: 4045 - DNA, 20 bp, Artificial sequence
  Synthetic oligonucleotide
gatattaccatttctagcaa

SEQ ID NO: 4046 - DNA, 20 bp, Artificial sequence
  Synthetic oligonucleotide
gctgttgcttgtctcgctct

SEQ ID NO: 4047 - DNA, 20 bp, Artificial sequence
  Synthetic oligonucleotide
tgtttaccatgacttccttt

SEQ ID NO: 4048 - DNA, 20 bp, Artificial sequence
  Synthetic oligonucleotide
cctgctatgcttcacttcca

SEQ ID NO: 4049 - DNA, 20 bp, Artificial sequence
  Synthetic oligonucleotide
tgatcttatatttaatggca

SEQ ID NO: 4050 - DNA, 20 bp, Artificial sequence
  Synthetic oligonucleotide
gcttggactttattcctgtt

SEQ ID NO: 4051 - DNA, 20 bp, Artificial sequence
  Synthetic oligonucleotide
ttggtatgccattccacatt

SEQ ID NO: 4052 - DNA, 20 bp, Artificial sequence
  Synthetic oligonucleotide
aatgaatccaacaatgtata

SEQ ID NO: 4053 - DNA, 20 bp, Artificial sequence
  Synthetic oligonucleotide
ttcgcttagtccaatatgca

SEQ ID NO: 4054 - DNA, 20 bp, Artificial sequence
  Synthetic oligonucleotide
atgacctccataatccatcc

SEQ ID NO: 4055 - DNA, 20 bp, Artificial sequence
  Synthetic oligonucleotide
gcagcataccaattgcgcaa

SEQ ID NO: 4056 - DNA, 20 bp, Artificial sequence
  Synthetic oligonucleotide
gctgtccagaaatactgccc

SEQ ID NO: 4057 - DNA, 20 bp, Artificial sequence
  Synthetic oligonucleotide
gcccaagtagacagtctatc

SEQ ID NO: 4058 - DNA, 20 bp, Artificial sequence
  Synthetic oligonucleotide
aaatttaccattttagcatt

SEQ ID NO: 4059 - DNA, 20 bp, Artificial sequence
  Synthetic oligonucleotide
gccttttcataatacagagc

SEQ ID NO: 4060 - DNA, 20 bp, Artificial sequence
  Synthetic oligonucleotide
gctgtacttactgccatcct

SEQ ID NO: 4061 - DNA, 20 bp, Artificial sequence
  Synthetic oligonucleotide
tctcacagttatcacttcat

SEQ ID NO: 4062 - DNA, 20 bp, Artificial sequence
  Synthetic oligonucleotide
gcttccactacttgtatctc

SEQ ID NO: 4063 - DNA, 20 bp, Artificial sequence
  Synthetic oligonucleotide
gagacttgaatccttaacaa

SEQ ID NO: 4064 - DNA, 20 bp, Artificial sequence
  Synthetic oligonucleotide
agcccatgttcatttggctt

SEQ ID NO: 4065 - DNA, 20 bp, Artificial sequence
  Synthetic oligonucleotide
tgagccaatcaacacaggct

SEQ ID NO: 4066 - DNA, 20 bp, Artificial sequence
  Synthetic oligonucleotide
gctggatttcataggccttc

SEQ ID NO: 4067 - DNA, 20 bp, Artificial sequence
  Synthetic oligonucleotide
cctgattccatgtacttata

SEQ ID NO: 4068 - DNA, 20 bp, Artificial sequence
  Synthetic oligonucleotide
gtattcttgctcctattccc

SEQ ID NO: 4069 - DNA, 20 bp, Artificial sequence
  Synthetic oligonucleotide
tcccaggtactgaccaggca

SEQ ID NO: 4070 - DNA, 20 bp, Artificial sequence
  Synthetic oligonucleotide
ctgatgtctttcaactacca

SEQ ID NO: 4071 - DNA, 20 bp, Artificial sequence
  Synthetic oligonucleotide
gtatttcttcttcaatggga

SEQ ID NO: 4072 - DNA, 20 bp, Artificial sequence
  Synthetic oligonucleotide
ttgccactctgtcactgcca

SEQ ID NO: 4073 - DNA, 20 bp, Artificial sequence
  Synthetic oligonucleotide
atgtgtatgtatatttatct

SEQ ID NO: 4074 - DNA, 20 bp, Artificial sequence
  Synthetic oligonucleotide
tgtgtcccagaacatgggca

SEQ ID NO: 4075 - DNA, 20 bp, Artificial sequence
  Synthetic oligonucleotide
acatgtgcatatttatataa

SEQ ID NO: 4076 - DNA, 20 bp, Artificial sequence
  Synthetic oligonucleotide
cctcagtatataatgtgact

SEQ ID NO: 4077 - DNA, 20 bp, Artificial sequence
  Synthetic oligonucleotide
aggctactcttgacccatat

SEQ ID NO: 4078 - DNA, 20 bp, Artificial sequence
  Synthetic oligonucleotide
gccttcttattgcataactc

SEQ ID NO: 4079 - DNA, 20 bp, Artificial sequence
  Synthetic oligonucleotide
aggaccgtctttccaagact

SEQ ID NO: 4080 - DNA, 20 bp, Artificial sequence
  Synthetic oligonucleotide
tcttcatgcttacagtccac

SEQ ID NO: 4081 - DNA, 20 bp, Artificial sequence
  Synthetic oligonucleotide
atctataccgactttagaaa

SEQ ID NO: 4082 - DNA, 20 bp, Artificial sequence
  Synthetic oligonucleotide
agccacttctgacaacagca

SEQ ID NO: 4083 - DNA, 20 bp, Artificial sequence
  Synthetic oligonucleotide
ggtctccattcaagtcatca

SEQ ID NO: 4084 - DNA, 20 bp, Artificial sequence
  Synthetic oligonucleotide
atctgtttctatcacagtct

SEQ ID NO: 4085 - DNA, 20 bp, Artificial sequence
  Synthetic oligonucleotide
gcctctgatgatctttgcat

SEQ ID NO: 4086 - DNA, 20 bp, Artificial sequence
  Synthetic oligonucleotide
cctccttgtttcctagttaa

SEQ ID NO: 4087 - DNA, 20 bp, Artificial sequence
  Synthetic oligonucleotide
catgctacctcatcactctc

SEQ ID NO: 4088 - DNA, 20 bp, Artificial sequence
  Synthetic oligonucleotide
gcttggtgtctaccctttcc

SEQ ID NO: 4089 - DNA, 20 bp, Artificial sequence
  Synthetic oligonucleotide
cggttctcttcaccatcaca

SEQ ID NO: 4090 - DNA, 20 bp, Artificial sequence
  Synthetic oligonucleotide
tgctatctcccacatcaagc

SEQ ID NO: 4091 - DNA, 20 bp, Artificial sequence
  Synthetic oligonucleotide
tctgttgtctccaatggcct

SEQ ID NO: 4092 - DNA, 20 bp, Artificial sequence
  Synthetic oligonucleotide
gctgactgtagaccctagga

SEQ ID NO: 4093 - DNA, 20 bp, Artificial sequence
  Synthetic oligonucleotide
cctactatatgatagctccc

SEQ ID NO: 4094 - DNA, 20 bp, Artificial sequence
  Synthetic oligonucleotide
tgtgcagattcacagtggct

SEQ ID NO: 4095 - DNA, 20 bp, Artificial sequence
  Synthetic oligonucleotide
agtcattcatgtttaatttc

SEQ ID NO: 4096 - DNA, 20 bp, Artificial sequence
  Synthetic oligonucleotide
tggctttctcattaagcatt

SEQ ID NO: 4097 - DNA, 20 bp, Artificial sequence
  Synthetic oligonucleotide
gtgtcagccatacagtagca

SEQ ID NO: 4098 - DNA, 20 bp, Artificial sequence
  Synthetic oligonucleotide
ccaaactttctgttcaagca

SEQ ID NO: 4099 - DNA, 20 bp, Artificial sequence
  Synthetic oligonucleotide
ccatggcttagatattgccc

SEQ ID NO: 4100 - DNA, 20 bp, Artificial sequence
  Synthetic oligonucleotide
catgccatcaaacagcttat

SEQ ID NO: 4101 - DNA, 20 bp, Artificial sequence
  Synthetic oligonucleotide
cacttcatcagatatcctta

SEQ ID NO: 4102 - DNA, 20 bp, Artificial sequence
  Synthetic oligonucleotide
agtctacaagaccactgcca

SEQ ID NO: 4103 - DNA, 20 bp, Artificial sequence
  Synthetic oligonucleotide
gcacaattatgactgtcatt

SEQ ID NO: 4104 - DNA, 20 bp, Artificial sequence
  Synthetic oligonucleotide
cctctctttcttggacaact

SEQ ID NO: 4105 - DNA, 20 bp, Artificial sequence
  Synthetic oligonucleotide
aaggtctgcttatttcatta

SEQ ID NO: 4106 - DNA, 20 bp, Artificial sequence
  Synthetic oligonucleotide
tctggatccctaccatgtac

SEQ ID NO: 4107 - DNA, 20 bp, Artificial sequence
  Synthetic oligonucleotide
ctgaagtccttatccctcta

SEQ ID NO: 4108 - DNA, 20 bp, Artificial sequence
  Synthetic oligonucleotide
tcggcttctaaaatggtgca

SEQ ID NO: 4109 - DNA, 20 bp, Artificial sequence
  Synthetic oligonucleotide
tgtaggtatatctaatgatc

SEQ ID NO: 4110 - DNA, 20 bp, Artificial sequence
  Synthetic oligonucleotide
ccacttgttgccctcttgca

SEQ ID NO: 4111 - DNA, 20 bp, Artificial sequence
  Synthetic oligonucleotide
gctttcctctcaaccatttc

SEQ ID NO: 4112 - DNA, 20 bp, Artificial sequence
  Synthetic oligonucleotide
gtatgcacacatctgactct

SEQ ID NO: 4113 - DNA, 20 bp, Artificial sequence
  Synthetic oligonucleotide
gttctccccatcagttactc

SEQ ID NO: 4114 - DNA, 20 bp, Artificial sequence
  Synthetic oligonucleotide
caggaattagagtaccagta

SEQ ID NO: 4115 - DNA, 20 bp, Artificial sequence
  Synthetic oligonucleotide
aaagttctacattaaggtga

SEQ ID NO: 4116 - DNA, 20 bp, Artificial sequence
  Synthetic oligonucleotide
agcacgctctctcacacctc

SEQ ID NO: 4117 - DNA, 20 bp, Artificial sequence
  Synthetic oligonucleotide
ctcaccttcaatatccaagc

SEQ ID NO: 4118 - DNA, 20 bp, Artificial sequence
  Synthetic oligonucleotide
acacatctatctttgaggaa

SEQ ID NO: 4119 - DNA, 20 bp, Artificial sequence
  Synthetic oligonucleotide
ttgttaccagatcatttcta

SEQ ID NO: 4120 - DNA, 20 bp, Artificial sequence
  Synthetic oligonucleotide
attccaatagagacccctca

SEQ ID NO: 4121 - DNA, 20 bp, Artificial sequence
  Synthetic oligonucleotide
cttgccttctactatgacat

SEQ ID NO: 4122 - DNA, 20 bp, Artificial sequence
  Synthetic oligonucleotide
taccaatgctttcaccgtct

SEQ ID NO: 4123 - DNA, 20 bp, Artificial sequence
  Synthetic oligonucleotide
gctgtctttgttctaattac

SEQ ID NO: 4124 - DNA, 20 bp, Artificial sequence
  Synthetic oligonucleotide
gccacttctgacaacagcaa

SEQ ID NO: 4125 - DNA, 20 bp, Artificial sequence
  Synthetic oligonucleotide
gctgagatagcacctatctc

SEQ ID NO: 4126 - DNA, 20 bp, Artificial sequence
  Synthetic oligonucleotide
atgccatcaaacagcttatc

SEQ ID NO: 4127 - DNA, 20 bp, Artificial sequence
  Synthetic oligonucleotide
tggctccctatgcagaacac

SEQ ID NO: 4128 - DNA, 20 bp, Artificial sequence
  Synthetic oligonucleotide
ccagatcatttctactcttc

SEQ ID NO: 4129 - DNA, 20 bp, Artificial sequence
  Synthetic oligonucleotide
atggactatgcatctcttac

SEQ ID NO: 4130 - DNA, 20 bp, Artificial sequence
  Synthetic oligonucleotide
ggtggctttcttagtaagcc

SEQ ID NO: 4131 - DNA, 20 bp, Artificial sequence
  Synthetic oligonucleotide
atgctacctcatcactctct

SEQ ID NO: 4132 - DNA, 20 bp, Artificial sequence
  Synthetic oligonucleotide
ttgaatccttaacaatccca

SEQ ID NO: 4133 - DNA, 20 bp, Artificial sequence
  Synthetic oligonucleotide
ctgtgtcccagaacatgggc

SEQ ID NO: 4134 - DNA, 20 bp, Artificial sequence
  Synthetic oligonucleotide
gctcattttagcccccatct

SEQ ID NO: 4135 - DNA, 20 bp, Artificial sequence
  Synthetic oligonucleotide
agtagcttatatattaagct

SEQ ID NO: 4136 - DNA, 20 bp, Artificial sequence
  Synthetic oligonucleotide
tcgcttagtccaatatgcaa

SEQ ID NO: 4137 - DNA, 20 bp, Artificial sequence
  Synthetic oligonucleotide
gcctatgtgcatattctccc

SEQ ID NO: 4138 - DNA, 20 bp, Artificial sequence
  Synthetic oligonucleotide
cccctaccatactccaagct

SEQ ID NO: 4139 - DNA, 20 bp, Artificial sequence
  Synthetic oligonucleotide
tccctcttcctagttcatcc

SEQ ID NO: 4140 - DNA, 20 bp, Artificial sequence
  Synthetic oligonucleotide
ccttcttattgcataactcc

SEQ ID NO: 4141 - DNA, 20 bp, Artificial sequence
  Synthetic oligonucleotide
tggctctgctcactaggatc

SEQ ID NO: 4142 - DNA, 20 bp, Artificial sequence
  Synthetic oligonucleotide
catgtgcatatttatataaa

SEQ ID NO: 4143 - DNA, 20 bp, Artificial sequence
  Synthetic oligonucleotide
tgcacttcaccatagcaaca

SEQ ID NO: 4144 - DNA, 20 bp, Artificial sequence
  Synthetic oligonucleotide
tactgcccagttgcctcctc

SEQ ID NO: 4145 - DNA, 20 bp, Artificial sequence
  Synthetic oligonucleotide
ccatcagttactctgttcca

SEQ ID NO: 4146 - DNA, 20 bp, Artificial sequence
  Synthetic oligonucleotide
tattcttgctcctattccca

SEQ ID NO: 4147 - DNA, 20 bp, Artificial sequence
  Synthetic oligonucleotide
atgaatccaacaatgtataa

SEQ ID NO: 4148 - DNA, 20 bp, Artificial sequence
  Synthetic oligonucleotide
atttaccattttagcatttc

SEQ ID NO: 4149 - DNA, 20 bp, Artificial sequence
  Synthetic oligonucleotide
aaagatgcttgtttccagcc

SEQ ID NO: 4150 - DNA, 20 bp, Artificial sequence
  Synthetic oligonucleotide
accgactttagaaactcata

SEQ ID NO: 4151 - DNA, 20 bp, Artificial sequence
  Synthetic oligonucleotide
tggactttattcctgttaaa

SEQ ID NO: 4152 - DNA, 20 bp, Artificial sequence
  Synthetic oligonucleotide
gggtcatttcttatccctac

SEQ ID NO: 4153 - DNA, 20 bp, Artificial sequence
  Synthetic oligonucleotide
ggttctcttcaccatcacac

SEQ ID NO: 4154 - DNA, 20 bp, Artificial sequence
  Synthetic oligonucleotide
actccatttatctcagctgc

SEQ ID NO: 4155 - DNA, 20 bp, Artificial sequence
  Synthetic oligonucleotide
tgatctttgcatcaaacccc

SEQ ID NO: 4156 - DNA, 20 bp, Artificial sequence
  Synthetic oligonucleotide
tcatgattatcccatcttgc

SEQ ID NO: 4157 - DNA, 20 bp, Artificial sequence
  Synthetic oligonucleotide
ctgtttctatcacagtctcc

SEQ ID NO: 4158 - DNA, 20 bp, Artificial sequence
  Synthetic oligonucleotide
tgtgtatgtatatttatcta

SEQ ID NO: 4159 - DNA, 20 bp, Artificial sequence
  Synthetic oligonucleotide
atgcacacatctgactctca

SEQ ID NO: 4160 - DNA, 20 bp, Artificial sequence
  Synthetic oligonucleotide
ttccaatagagacccctcac

SEQ ID NO: 4161 - DNA, 20 bp, Artificial sequence
  Synthetic oligonucleotide
gatcttatatttaatggcat

SEQ ID NO: 4162 - DNA, 20 bp, Artificial sequence
  Synthetic oligonucleotide
tggtgtctaccctttccaac

SEQ ID NO: 4163 - DNA, 20 bp, Artificial sequence
  Synthetic oligonucleotide
tggtatgccattccacattt

SEQ ID NO: 4164 - DNA, 20 bp, Artificial sequence
  Synthetic oligonucleotide
tcatggtatatacacaggac

SEQ ID NO: 4165 - DNA, 20 bp, Artificial sequence
  Synthetic oligonucleotide
ccttgctgcaattcctctag

SEQ ID NO: 4166 - DNA, 20 bp, Artificial sequence
  Synthetic oligonucleotide
tatcacttcattttggcacc

SEQ ID NO: 4167 - DNA, 20 bp, Artificial sequence
  Synthetic oligonucleotide
ggctttgtatcatttcatca

SEQ ID NO: 4168 - DNA, 20 bp, Artificial sequence
  Synthetic oligonucleotide
ctggatccctaccatgtact

SEQ ID NO: 4169 - DNA, 20 bp, Artificial sequence
  Synthetic oligonucleotide
gctttcaactgaaacctcaa

SEQ ID NO: 4170 - DNA, 20 bp, Artificial sequence
  Synthetic oligonucleotide
gcttgagtatcatctctgct

SEQ ID NO: 4171 - DNA, 20 bp, Artificial sequence
  Synthetic oligonucleotide
attaccatttctagcaagca

SEQ ID NO: 4172 - DNA, 20 bp, Artificial sequence
  Synthetic oligonucleotide
cagtagaataatcatgccaa

SEQ ID NO: 4173 - DNA, 20 bp, Artificial sequence
  Synthetic oligonucleotide
aggttcatccttgctggcca

SEQ ID NO: 4174 - DNA, 20 bp, Artificial sequence
  Synthetic oligonucleotide
gtttgcatactaactaccac

SEQ ID NO: 4175 - DNA, 20 bp, Artificial sequence
  Synthetic oligonucleotide
ctctggctcatactcttgca

SEQ ID NO: 4176 - DNA, 20 bp, Artificial sequence
  Synthetic oligonucleotide
ggaccgtctttccaagactt

SEQ ID NO: 4177 - DNA, 20 bp, Artificial sequence
  Synthetic oligonucleotide
tcttctttacctcatcagtt

SEQ ID NO: 4178 - DNA, 20 bp, Artificial sequence
  Synthetic oligonucleotide
ttcagtttgcttcacaactc

SEQ ID NO: 4179 - DNA, 20 bp, Artificial sequence
  Synthetic oligonucleotide
agctgcttgccatcatgcgc

SEQ ID NO: 4180 - DNA, 20 bp, Artificial sequence
  Synthetic oligonucleotide
acttcatcagatatccttat

SEQ ID NO: 4181 - DNA, 20 bp, Artificial sequence
  Synthetic oligonucleotide
gaggaagcacttatgtgttc

SEQ ID NO: 4182 - DNA, 20 bp, Artificial sequence
  Synthetic oligonucleotide
ctgctatgcttcacttccaa

SEQ ID NO: 4183 - DNA, 20 bp, Artificial sequence
  Synthetic oligonucleotide
tgatgtctttcaactaccat

SEQ ID NO: 4184 - DNA, 20 bp, Artificial sequence
  Synthetic oligonucleotide
aagcaaccttaactgcaatt

SEQ ID NO: 4185 - DNA, 20 bp, Artificial sequence
  Synthetic oligonucleotide
catggcttagatattgccca

SEQ ID NO: 4186 - DNA, 20 bp, Artificial sequence
  Synthetic oligonucleotide
tgacctccataatccatcca

SEQ ID NO: 4187 - DNA, 20 bp, Artificial sequence
  Synthetic oligonucleotide
gagatctcaccttagttgcc

SEQ ID NO: 4188 - DNA, 20 bp, Artificial sequence
  Synthetic oligonucleotide
tcagggaccactcagtggtt

SEQ ID NO: 4189 - DNA, 20 bp, Artificial sequence
  Synthetic oligonucleotide
ttcataggccttcacccttt

SEQ ID NO: 4190 - DNA, 20 bp, Artificial sequence
  Synthetic oligonucleotide
cccaggtactgaccaggcaa

SEQ ID NO: 4191 - DNA, 20 bp, Artificial sequence
  Synthetic oligonucleotide
ttcctaacactccagtcaac

SEQ ID NO: 4192 - DNA, 20 bp, Artificial sequence
  Synthetic oligonucleotide
agtccttatccctctacctc

SEQ ID NO: 4193 - DNA, 20 bp, Artificial sequence
  Synthetic oligonucleotide
aacactttgccaccatgctt

SEQ ID NO: 4194 - DNA, 20 bp, Artificial sequence
  Synthetic oligonucleotide
gattccagatgatttctgcc

SEQ ID NO: 4195 - DNA, 20 bp, Artificial sequence
  Synthetic oligonucleotide
gaagatcttttctccacact

SEQ ID NO: 4196 - DNA, 20 bp, Artificial sequence
  Synthetic oligonucleotide
gcacgctctctcacacctcc

SEQ ID NO: 4197 - DNA, 20 bp, Artificial sequence
  Synthetic oligonucleotide
ttccactacttgtatctctt

SEQ ID NO: 4198 - DNA, 20 bp, Artificial sequence
  Synthetic oligonucleotide
tgccactctgtcactgccaa
